(19) United States
(12) Patent Application Publication
(10) Pub. No.: US 2025/0108080 A1
(43) Pub. Date: Apr. 3, 2025

(54) EXTRACELLULAR VESICLES FROM GENETICALLY-MODIFIED MICROALGAE CONTAINING ENDOGENOUSLY-LOADED CARGO, THEIR PREPARATION, AND USES

(71) Applicant: AGS THERAPEUTICS SAS, Paris (FR)

(72) Inventors: Lila DRITTANTI, Paris (FR); Manuel VEGA, Paris (FR)

(21) Appl. No.: 18/959,314

(22) Filed: Nov. 25, 2024

Related U.S. Application Data
(63) Continuation of application No. PCT/EP2023/064751, filed on Jun. 1, 2023.
Application No. PCT/EP2023/064751 is a continuation-in-part of application No. PCT/EP2023/051650, filed on Jan. 24, 2023.
(60) Provisional application No. 63/349,006, filed on Jun. 3, 2022.

(51) Int. Cl. A61K 36/05; C12N 15/79

(52) U.S. Cl. CPC A61K 36/05; C12N 15/79; C12N 2800/10

(57) ABSTRACT

Provided are compositions containing extracellular vesicles (MEVs) produced in and isolated from genetically-engineered microalgae, which encode cargo, such as nucleic acids and polypeptides. The MEVs are endogenously loaded by the microalgae with the cargo. The MEVs have a variety of applications as a delivery system for therapeutics, including vaccines, anti-cancer therapeutics, diagnostics, and other such uses. The fate of MEVs upon administration depends upon the route of administration.

### RELATED APPLICATIONS

[0001] This application is a continuation of International PCT application No. PCT/EP2023/064751, filed Jun. 1, 2023, entitled “Extracellular Vesicles from Genetically-Modified Microalgae Containing Endogenously-Loaded Cargo, their Preparation, and Uses,” to inventors Lila Drittanti and Manuel Vega, and to Applicant AGS Therapeutics SAS. International PCT application No. PCT/EP2023/064751, claims benefit of priority to of U.S. provisional application Ser. No. 63/349,006, filed Jun. 3, 2022, entitled “Extracellular Vesicles from Genetically-Modified Microalgae Containing Endogenously Loaded Cargo, their Preparation, and Uses,” to Applicant AGS Therapeutics SAS, and inventors Lila Drittanti and Manuel Vega. International PCT application No. PCT/EP2023/064751, claims benefit of priority to of International PCT application No. PCT/EP2023/051650, filed Jan. 24, 2023, entitled “Extracellular Vesicles from Microalgae, Their Biodistribution Upon Administration, and Uses,” to Applicant AGS Therapeutics SAS, and inventors Lila Drittanti, and Manuel Vega for subject matter only entitled to the Jan. 24, 2023 date. International PCT application No. PCT/EP2023/064751 is a continuation-in-part of International PCT application No. PCT/EP2023/051650.

[0002] This application claims the benefit of priority to, as a continuation-in-part, of International PCT Application No. PCT/EP2023/051650, filed Jan. 24, 2023, entitled “Extracellular Vesicles from Microalgae, Their Biodistribution Upon Administration, and Uses,” to Applicant AGS Therapeutics SAS, and inventors Lila Drittanti, and Manuel Vega for subject matter only entitled to the Jan. 24, 2023 date.

[0003] Benefit of priority is claimed to U.S. provisional application Ser. No. 63/349,006, filed Jun. 3, 2022, entitled “Extracellular Vesicles from Genetically-Modified Microalgae Containing Endogenously Loaded Cargo, their Preparation, and Uses,” to Applicant AGS Therapeutics SAS, and inventors Lila Drittanti and Manuel Vega.

[0004] The subject matter of each of these applications is incorporated by reference in its entirety.

### Incorporation by Reference of Sequence Listing Provided Electronically

[0005] An electronic version of the Sequence Listing is filed herewith, the contents of which are incorporated by reference in their entirety. The electronic file was created Nov. 15, 2024, is 1,357,270 bytes in size, and is titled 5504SEQ001.XML.

### FIELD

[0006] Provided are compositions, methods, and uses, containing extracellular vesicles produced by genetically-modified microalgae. Extracellular vesicles can serve as drug delivery systems. The extracellular vesicles provided herein contain endogenously-loaded cargo, and are produced by the genetically-modified microalgae, which produce microalgae extracellular vesicles (MEVs) that are endogenously loaded with bioactive cargo. The MEVs have a variety of applications as therapeutics, including for delivery of therapeutics, such as proteins, polypeptides, peptide therapeutics, and RNA. They, thus, serve as drug delivery systems. Also provided are the genetically-modified microalgae and methods of producing the endogenous cargo-loaded MEVs.

### BACKGROUND

[0007] Extracellular vesicles (EVs) are natural particles produced by most cells. EVs include exosomes (about 30-120 nm in size), which are released to the extracellular environment upon fusion of multivesicular endosomes with the plasma membrane and include microvesicles (about 50-1000 nm), which are produced by the outward budding of membrane vesicles from the cell surface. Exosomes and microvesicles have similar properties, and in general are referred to as EVs.

[0008] EVs function in intercellular communication via cell-cell transfer of proteins, and nucleic acids, such as microRNAs (miRNAs), long noncoding RNAs (lncRNAs), and mRNAs. By virtue of this, EVs derived from mammals and plants have been used as carriers for short interfering RNA (siRNA) delivery, microRNA (miRNA), and small molecule drugs. There is a need for conveniently produced EVs that are readily delivered to cells and tissues. It is an object herein to provide such EVs.

### SUMMARY

[0009] Provided are endogenously-loaded extracellular vesicles (MEVs) from genetically engineered microalgae. Microalgae are unicellular green algae, and include those that belong to the order Chlorellales, in particular the Chlorellaceae family, and in particular those that belong to the Chlorella genus, such as Chlorella vulgaris. The MEVs are loaded with cargo that includes bioactive molecules, long non-coding (Inc) RNA encoding small open reading frames (sORFs), or its translated small peptides (less than 100 amino acids); mRNA encoding open reading frames (ORFs) or its translated peptides (more than 100 amino acids), and proteins; and protein/protein or protein/RNA complexes. The MEVs herein are endogenously loaded with cargo by genetically-engineered microalgae cells. The genetically-engineered microalgae cells encode the cargo, which is loaded in vivo into the MEVs.

[0010] MEVs are endogenously loaded by genetically engineered microalgae cells with bioactive molecule cargo heterologous to the MEVs or the microalgae in that the cargo is encoded by the generically-modified microalgae for packaging in the MEVs. The resulting compositions, thus, contain MEVs that have the same endogenously-loaded heterologous cargo because the cargo is encoded by the microalgae and packaged into the MEVs by the microalgae.

[0011] Provided are compositions that contain endogenously-loaded MEVs, particularly those produced by engineered microalgae cells from the order Chlorellales, in particular from the Chlorellaceae family, and in particular from the Chlorella genus, such as Chlorella vulgaris. Methods for obtaining endogenously loaded MEVs are provided. The cargos are bioactive molecules or combinations thereof, including nucleic acids, sORFs, peptides and proteins. The cargos include, for example, biomolecules, including biopolymers, such as RNA, peptides, proteins, protein complexes, and protein-nucleic acid complexes. The bioactive molecules include therapeutics, such as anti-cancer compounds and biomolecules, such as RNAi, proteins, and complexes; vaccine molecules, such as proteins, peptides, nucleic acid, protein complexes and protein-nucleic acid complexes; diagnostic molecules, such as detectable markers; and molecules that are cosmetics. Methods of treatment of diseases, disorders, and conditions, including pathogen infections and cancers, and uses for the endogenously loaded MEVs for treatment for the diseases and disorders are provided, as are methods of diagnosis, and uses of MEVs for prevention, reduction of risk, prophylaxis of pathogen infections and cancers. The compositions can be employed as drug delivery systems, and formulated for particular routes of administration.

[0012] The resulting endogenously loaded MEVs, loaded by genetically engineered microalgae, have applications in a variety of fields, including diagnosis, prophylaxis, treatment of human diseases, industrial uses, and cosmetics. The MEVs, with appropriate cargo for each application, can be used as vaccines, as gene therapy delivery vectors, for therapeutic prophylaxis, for a variety of purposes, such as gene silencing, gene editing, gene modulation, in the industry and for research, analytical methods, cell-based assays, and other uses and applications.

[0013] Provided are microalgae cell cultures, comprising genetically-modified microalgae, where the microalgae or microalgae cell culture comprise microalgae extracellular vesicles (MEVs) containing endogenous cargo; the MEVs are produced by the microalgae cells; the endogenous cargo is produced by microalgae in which the MEVs were produced. The endogenous cargo comprises bioactive molecules that are heterologous to the microalgae; and the heterologous bioactive molecules comprise RNA molecules, small peptides, peptides, polypeptides, and/or proteins, with the proviso that the RNA molecules do not comprise inhibitory RNA (RNAi) or particularly siRNA, and more particularly siRNA that targets pathogens. In all embodiments herein, RNAi includes small inhibiting RNA (siRNA), micro-RNA (miRNA), and/or short-hairpin RNA (shRNA).

[0014] Also provided are microalgae cell cultures, comprising genetically-modified microalgae, where: the microalgae or microalgae cell culture comprise microalgae extracellular vesicles (MEVs) containing endogenous cargo; the MEVs are produced by the microalgae cells; the endogenous cargo is produced by microalgae in which the MEVs were produced; the endogenous cargo comprises bioactive molecules that are heterologous to the microalgae; and the heterologous bioactive molecules comprise inhibitory RNA (RNAi), with the proviso that the RNAi does not comprise heterologous RNAi designed to target pathogen genes and/or host pathogen-susceptibility factors.

[0015] Also provided is cell culture medium from microalgae cell cultures. The cell culture medium, which is medium from a cell culture, with cell debris removed, comprises microalgae extracellular vesicles (MEVs) containing endogenously-loaded (endo-loaded) cargo. The MEVs are produced by genetically-modified microalgae cells in the cell culture; the microalgae cells are genetically modified to produce the endogenous cargo; the endogenous cargo is produced by the microalgae cells in which the MEVs are produced; the endogenous cargo comprises bioactive molecules that are heterologous to the microalgae; and the heterologous bioactive molecules comprise RNA molecules, small peptides, peptides, polypeptides, and/or proteins, with the proviso that the RNA molecules do not comprise RNAi, for packaging in MEVs. Provided is microalgae cell culture medium, comprising microalgae extracellular vesicles (MEVs) containing endogenous cargo, where the MEVs are produced by genetically-modified microalgae cells in the cell culture; the endogenous cargo is produced by microalgae in which the MEVs were produced; the endogenous cargo comprises bioactive molecules that are heterologous to the microalgae; and the heterologous bioactive molecules comprise RNAi, with the proviso that the RNAi does not target pathogen genes and/or host pathogen-susceptibility factors.

[0016] Provided are genetically-modified microalgae cells. The genetically-modified microalgae comprise genome modifications that improve or enhance or modulate or control production of EVs. The genetically-modified microalgae also or alternatively comprises heterologous nucleic acid that encodes cargo for endogenous loading.

[0017] Provided are genetically-modified microalgae cells that comprise microalgae extracellular vesicles (MEVs) containing endogenous cargo, where: the MEVs are produced by the genetically-modified microalgae cell; the endogenous cargo is produced by microalgae in which the MEVs were produced; the endogenous cargo comprises bioactive molecules that are heterologous to the microalgae; the endogenous cargo is produced by the microalgae cell via natural or modified biosynthetic pathway(s); and the heterologous bioactive molecules comprise RNA molecules, small peptides, peptides, polypeptides, and/or proteins, with the proviso that the RNA molecules do not comprise RNAi.

[0018] Provided are genetically-modified microalgae cells comprising microalgae extracellular vesicles (MEVs) containing endogenous cargo, where: the MEV is produced by the genetically-modified microalgae cell; the endogenous cargo is produced by microalgae in which the MEVs were produced; the endogenous cargo comprises bioactive molecules that are heterologous to the microalgae; the endogenous cargo is produced by the microalgae cell via natural or modified biosynthetic pathway(s); and the heterologous bioactive molecules comprise RNAi, with the proviso that the RNAi does not target pathogen genes and/or host pathogen-susceptibility factors. The genetically-modified microalgae cells can comprise a producer cell line for producing MEVs with endogenously-loaded (endo-loaded) cargo.

[0019] Provided are microalgae extracellular vesicles (MEVs) isolated from the cell culture or cell culture medium, and/or from or produced by the genetically-modified microalgae.

[0020] Compositions containing the microalgae extracellular vesicles (MEVs) containing endogenous cargo are provided. Compositions include pharmaceutical compositions containing an MEV or MEVs in a pharmaceutically acceptable vehicle or carrier. The compositions can be formulated for particular routes of administration. As shown herein, MEVs can be directed to different organs and tissues by selecting a route of administration. For example, the MEVs provided herein can be administered orally and survive the stomach and enter the intestines and traffic to gut-associated lymphoid tissues (GALT). Other routes of administration, as shown herein, result, for example in trafficking to mucosa-associated lymphoid tissue (MALT), bronchus-associated lymphoid tissues (BALT), nasal-associated lymphoid tissues (NALT), conjunctival-associated lymphoid tissues (CALT), larynx-associated lymphoid tissues (LALT), skin-associated lymphoid tissues (SALT), vulval-vaginal-associated lymphoid tissues (VALT), and testis associated lymphoid tissues (TALT).

[0021] Endogenous cargo for treatment of a disease, disorder, or condition that involves a tissue or organ can be endogenously loaded into the MEVs, which can then be formulated for administration by a route that targets the tissue or organ. The MEVs and compositions containing the MEVs function as drug delivery systems in which a therapeutic is produced in the microalgae, loaded into the MEVs, which are isolated and formulated for a route of administration that targets a tissue or organ that is a target for the therapeutic. Hence provided are drug delivery systems (or compositions) that comprise the MEVs provided herein.

[0022] Provided are compositions that comprise an MEV or MEVs, where: the endogenous cargo is produced by microalgae in which the MEVs were produced; the endogenous cargo comprises bioactive molecules that are heterologous to the microalgae; the endogenous cargo is produced by the microalgae via natural or modified biosynthetic pathway(s); the heterologous bioactive molecules comprise RNA molecules, small peptides, peptides, polypeptides, and/or proteins, with the proviso that the RNA molecules do not comprise RNAi. Provided are compositions comprising the MEVs containing endogenously-loaded cargo. The MEVs are produced by the cell cultures, from the cell culture medium, produced by the genetically-modified microalgae cells.

[0023] Also provided are compositions that comprise microalgae extracellular vesicles (MEVs) containing endogenous cargo, where: the endogenous cargo is produced by microalgae in which the MEVs were produced; the endogenous cargo comprises bioactive molecules that are heterologous to the microalgae; the endogenous cargo is produced by the microalgae via natural or modified biosynthetic pathway(s); the heterologous bioactive molecules comprise RNAi, with the proviso that the RNAi does not target pathogen genes and/or host pathogen-susceptibility factors.

[0024] Provided are microalgae extracellular vesicles (MEVs), comprising endogenous cargo, where: the endogenous cargo is produced by microalgae in which the MEVs were produced; the endogenous cargo comprises bioactive molecules that are heterologous to the microalgae; the endogenous cargo is produced by the microalgae via natural or modified biosynthetic pathway(s); the heterologous bioactive molecules comprise RNA molecules, small peptides, peptides, polypeptides, and/or proteins, with the proviso that the RNA molecules do not comprise RNAi Provided is a microalgae extracellular vesicle (MEV), comprising endogenous cargo, where: the endogenous cargo is produced by microalgae in which the MEVs were produced; the endogenous cargo comprises bioactive molecules that are heterologous to the microalgae; the endogenous cargo is produced by the microalgae via natural or modified biosynthetic pathway(s); the heterologous bioactive molecules comprise RNAi, with the proviso that the RNAi does not target pathogen genes and/or host pathogen-susceptibility factors.

[0025] Provided is the cell culture, cell culture medium, genetically-modified microalgae cell, composition, or MEVs, where the endogenous cargo a comprises a peptide, small peptide, polypeptide, and/or a protein. In other embodiments, the endogenous cargo comprises RNA, such as coding RNA and non-coding RNA, with the proviso that the non-coding RNA molecules do not comprise inhibitory RNA

[0026] (RNAi), particularly with the proviso that the RNAi does not comprise RNAi designed to target pathogen genes and/or host pathogen-susceptibility factors. Coding RNA includes, but is not limited to, messenger RNA (mRNA), and non-coding RNA comprising a small open reading frame (sORF); and the non-coding RNA includes long non-coding RNA (lncRNA), short hairpin RNA (shRNA), siRNA, self-amplifying RNA, and small activating RNA (saRNA). RNAi can include siRNA and/or miRNA.

[0027] In any and all embodiments herein, the genetically-modified microalgae that produce the endo-loaded MEVs can be a species of Chlorella in a pharmaceutically acceptable carrier. Among the species are Chlorella ellipsoidea, Chlorella pyrenoidosa, Chlorella sorokiniana, Chlorella vulgaris, and Chlorella variabilis. In some embodiment the Chlorella is Chlorella vulgaris.

[0028] The MEVs and compositions provided herein can be used in any of the methods and uses as described herein or known to those of skill in the art for which the endogenous cargo can be used as described above and below.

[0029] The endogenously loaded MEVs from genetically engineered microalgae can be used for a variety of uses, including treatment of diseases, disorders, and conditions, industrial, and cosmetic uses. Diseases, disorders, and conditions, include, but not limited to: genetic disorders, disorders of the digestive tract, disorders of the respiratory tract, disorders of the central nervous system (CNS), disorders of the skin, including natural disorders, and disorders induced by trauma, disorders of the urogenital tract, disorders of the naso-buccal cavity, disorders of the cardiovascular system, immune and immunomodulatory disorders, cancers, ocular disorders, disorders of the liver, systemic disorders, and diseases, disorders, and conditions caused by or involving a pathogen, such as a bacterium, virus, or parasite.

[0030] Target tissues for treatment/delivery include, for example, epithelia and mucosa cells (any kind of either external or internal mucosa: mouth, gut, uterus, trachea, bladder, and others), endothelial cells, sensory cells (visual, auditory), cancer cells, tumor cells, blood cells, blood cell precursors, neural system cells (neurons, glial cells and other CNS and peripheral nervous cells), cells of the immune system (lymphocytes, immuno-regulatory cells, effector cells), germ cells, secretory cells, gland cells, muscle cells, stem cells, including, for example, embryonic or tissue specific stem cells, liver cells, infected cells, such as cells infected with virus, bacteria, fungi, or other pathogens, native cells, and NS genetically engineered cells.

[0031] Provided are compositions that contain isolated endo-loaded microalgae extracellular vesicles (MEVs), where the genetically engineered microalgae are of species of the genus Chlorella; and the composition is formulated for administration to a subject. The heterologous bioactive cargo molecule, produced by the genetically engineered microalgae cells, is introduced into the MEVs by the same microalgae cells before release of the MEVs to the culture medium. These microalgae cells produce the MEVs and at the same time microalgae load the MEVs before release to the medium. The cargo molecule is heterologous to Chlorella; and the bioactive cargo is a biomolecule.

[0032] For all embodiments, the Chlorella is any species of Chlorella, such as, but not limited to, Chlorella selected from among Chlorella ellipsoidea, Chlorella pyrenoidosa, Chlorella sorokiniana, Chlorella vulgaris, and Chlorella variabilis. In particular embodiments, the Chlorella is Chlorella vulgaris.

[0033] Provided are compositions that contain isolated endo-loaded microalgae extracellular vesicles (MEVs), where the genetically-modified microalgae is a species of Chlorella; the MEVs in the composition contain bioactive cargo molecule that has been introduced into the MEVs by the genetically-modified microalgae by cellular pathways, existing natural or modified cellular pathways, whereby the vesicles in the composition that contain the heterologous bioactive molecule cargo contain substantially the same cargo, where: the cargo is produced by genetically engineered Chlorella itself; and the cargo is a biomolecule. Each of the MEVs that contain cargo can comprise a plurality of different heterologous cargos. The MEVs can contain endogenously-loaded cargo, and can further contain exogenously-loaded cargo.

[0034] The endogenous cargo in the MEV comprises a heterologous peptide, or heterologous small peptide, or heterologous polypeptide, or heterologous protein. The cargo is heterologous to the microalgae in that it is not naturally produced by the microalgae and/or is produced in different amounts or from a different promoter. Cargo includes heterologous nucleic acid that is RNA, with the proviso that the RNA molecules do not comprise inhibitory RNA (RNAi) that targets pathogen genes and/or host pathogen susceptibility factors. Endogenous cargo includes mRNA or modified mRNA. The mRNA as synthesized by the microalgae comprises one or more modifications that inhibit or reduce translation by the microalgae ribosomes, but do not inhibit or reduce translation by ribosomes in animals, such as a human. The endogenous cargo can comprise mRNA that comprises a sequence of linked nucleosides, a 5′ UTR, a 3′ UTR, and at least one 5′ cap structure, optionally one or more regulatory sequences. As noted above, the cargo can comprise heterologous RNAi, with the proviso that the RNAi does not target pathogen genes and/or host pathogen-susceptibility factors. The endogenous cargo can comprise a gene editing system and/or a nucleic acid encoding a gene editing system, such as, for example, clustered regularly interspaced short palindromic repeats (CRISPR)-CRISPR-associated protein 9 (CRISPR-CAS) system, where, for example, the Cas9 is encoded by the nucleic acid molecule of SEQ ID NO:70 or a sequence comprising one or more degenerate codons or a sequence having at least 80%, 85%, 90%, or 95% sequence identity to the nucleic acid molecule of SEQ ID NO:70, or comprising the sequence of amino acids set forth in SEQ ID NO:71, or a sequence of amino acids having at least 95% sequence identity to the sequence of amino acids set forth in SEQ ID NO:71.

[0035] The microalgae cell can comprise DNA encoding the endogenous cargo, which is then packaged in the MEVs. The DNA can comprise a plasmid, which can be episomal or can integrate, in whole or part, into the genome of the microalgae. The plasmid can encode a therapeutic product, or a diagnostic product, or a pathway for production of a product by the microalgae and/or production by a subject to whom MEVs containing the endogenous cargo are administered. Endogenous cargo includes, therapeutic products, which include peptides, small peptides, polypeptides, proteins and RNA as described herein, and/or known to those of skill in the art. Therapeutic products include, for example, vaccines, which can be prophylactic or for treatment, anti-cancer products, treatments for infectious agents, and any therapeutic product. Endogenous cargo also includes products with cosmetic activity and products that have industrial uses. The plasmid, for example, can encode a protein product or mRNA for delivery to an animal following administration to the animal, such as a human. For example the endogenous cargo is heterologous to the microalgae, and comprises a small peptide, peptide, polypeptide and/or protein that is packaged in the MEV. Endogenous cargo also includes RNA as described above and below. RNA includes, for example, heterologous mRNA that is packaged in an MEV. The plasmid can be the endogenous cargo product under control of a eukaryotic promoter that is recognized by the microalgae RNA polymerase. Such promoters are known to those of skill in the art, and exemplary promoters, which include microalgae promoters, plant promoters and plant virus, such as those listed in the table in the detailed description, including those set forth or contained in any of SEQ ID NOs: 86-294, modified forms and variants thereof having at least 95%, 96%, 97%, 98%, 99% or more sequence identity with any of the promoter sequences set forth in SEQ ID NOs: 86-206 and with which a eukaryotic RNA polymerase interacts to initiate transcription. Included are inducible and constitutive promoters. The plasmid can further comprise other eukaryotic transcription sequences and eukaryotic translation sequences, such as, for example, one or more of an enhancer, a poly A sequence, and/or encodes an internal ribosome entry site (IRES) sequence. For example, the endogenous cargo in the MEVs can comprise mRNA that comprises an IRES, where the IRES is for translation in an animal, such as a human, and optionally is modified, whereby translation by microalgae ribosomes is reduced, and/or translation by an animal is facilitated or occurs. The plasmid can encode two or more cargo products. The cargo includes a therapeutic product, diagnostic product, and/or biosynthetic pathway that is operably linked to regulatory sequences recognized by a eukaryotic cell. Exemplary products include, an antibody or antigen, a vaccine, an anti-cancer product, and/or an immunomodulatory product. See detailed description and claims for other exemplary products. The vaccine can be prophylactic for preventing, reducing the risk of, or reducing the severity of a disease, disorder, or condition, or can be for use as a therapeutic to treat a disease, disorder, or condition. Endogenous cargo can comprise a nucleic acid, or a small peptide, or a peptide, or a polypeptide, or protein; and/or the endogenous cargo comprises a wild-type nucleic acid, or small peptide, or peptide, or polypeptide, or protein; or a nucleic acid, peptide, or polypeptide or protein that is modified by replacements, insertions, deletions, and/or transpositions of amino acid residues or nucleotide residues; and/or, if nucleic acid, the nucleic acid comprises optimized codon for expression in the microalgae cell, or for expression in the host to whom the MEVs are administered. The endogenous cargo can comprise or encode a protein that is an enzyme, or a hormone, or a cytokine, or a transport protein, or a receptor, or a growth factor, or a member of a signaling pathway, or a member of a protein-protein or protein-nucleic acid complex, or a member of a gene-editing complex or a fragment thereof, and an antibody or antigen-binding fragment thereof, such as an scFv, a bi-specific antibody, or an antigen-binding fragment thereof. Exemplary of antibodies and antigen-binding fragments include, but are not limited to: a checkpoint inhibitor antibody or antigen-binding fragment thereof, or is a tumor antigen-specific antibody or antigen-binding fragment thereof, or is an anti-oncogene specific antibody or antigen-binding fragment thereof, or is a tumor-specific receptor or signaling molecule antibody or antigen-binding fragment thereof. Therapeutic products that can be endo-loaded include vaccines, where the vaccine comprises nucleic acid, a peptide, a small peptide, a polypeptide and/or a protein.

[0036] The cargo, thus, includes any suitable heterologous bioactive molecules that are intended for delivery to animals, including human, and that can be introduced into the MEVs in vivo by the genetically engineered microalgae. In general, the cargo is bioactive. Bioactive cargo includes, for example, any molecules, such as biomolecules, including biopolymers, that can have an effect on an animal, including human, when administered. Cargo includes, for example, proteins, peptides, and nucleic acids. Included are any molecules that have been used as drugs or therapeutics or vaccines or diagnostics or cosmetics or in industry. The cargo can be, but is not limited to, a therapeutic for treating or preventing a disease or condition or treating or preventing a symptom thereof. The cargo can be a nucleic acid molecule, a polypeptide, and/or a protein, or other molecule that is produced in vivo in the genetically-modified microalgae and loaded (endo-loaded) into or produced in the MEVs by the microalgae.

[0037] The heterologous cargo present in the endo-loaded MEVs in the compositions can comprise a biopolymer. Biopolymers include a naturally occurring biopolymer, or a modified biopolymer, or a synthetic biopolymer, such as synthetic or modified protein or polypeptide, or encoding nucleic acid. The biopolymer can be a nucleic acid or peptide, small polypeptide, polypeptide or protein that includes modifications, where the modifications comprise insertions, deletions, replacements, and transpositions of nucleotides or amino acid residues, and/or, where the biopolymer is a protein, the modifications also can comprise post-translational modifications. Post-translational modifications include, but are not limited to, glycosylation, hyper-glycosylation, and other modifications that improve or alter pharmacological dynamic or kinetic properties of the protein. In all cases, heterologous cargos are endo loaded into the MEVs by microalgae cells that have been genetically modified to become producer cells (or producer cell lines), producers of the heterologous cargos.

[0038] The cargo includes therapeutic or diagnostic or theragnostic proteins or peptides, small peptides, polypeptides, and protein complexes, such as complexes that contain two or more proteins or a protein and nucleic acid, or a protein and aptamer, or combinations of proteins, nucleic acids, and other molecules. The cargo can be a protein that is an antibody or antigen-binding fragment thereof. Antibodies can be of any form, including single chain forms, nanobodies, camelids, and other forms, such as an scFv, a bi-specific antibody, or an antigen-binding fragment thereof. Antibodies and antigen-binding fragment thereof include a checkpoint inhibitor antibody or antigen-binding fragment thereof, or a tumor antigen-specific antibody or antigen-binding fragment thereof, or an anti-oncogene specific antibody or antigen-binding fragment thereof or is a tumor-specific receptor or signaling molecule antibody or antigen-binding fragment thereof. Exemplary antibodies and antigen-binding fragment thereof specifically binds to and inhibits one or more of CTLA-4, PD-1, PD-L1, PD-L2, the PD-1/PDL1 pathway, the PD-1/PDL2 pathway, HER2, EGFR, TIM-3, LAG-3, BTLA-4, HHLA-2, CD28, and other checkpoints or immune suppressors, immunomodulators, or tumor antigens. In all cases, heterologous cargos are endo loaded into the MEVs by microalgae cells that have been genetically modified to become producer cells (or producer cell lines), producers of the heterologous cargos. The heterologous cargo in the MEVs in the compositions can include immune stimulating products, or antigens, and can be used as a vaccine to induce an immunoprotective response upon administration. The heterologous cargo can be RNA, protein, or small peptide (sOFR). The heterologous cargo can contain nucleic acid or protein or small peptide (sOFR) that is a therapeutic product for treatment of cancer, or an infectious disease, or a neurodegenerative disease or other CNS disorder, or aging, or aging associated disease, or ophthalmic disorders, or immunological disorders, or genetic disorders or chronical or metabolic diseases. The heterologous cargo can be a cosmeceutical or a cosmetic or cosmetically active product. The heterologous cargo in the MEVs in the compositions can be or comprise a diagnostic marker or detectable product, such as, but not limited to, luciferase or a fluorescent protein. In all cases, heterologous cargos are endo loaded into the MEVs by microalgae cells that have been genetically modified to become producer cells (or producer cell lines), producers of the heterologous cargos.

[0039] Methods of preparing the endo loaded MEVs are provided. The methods include obtaining the genetically engineered microalgae cells producers of the heterologous cargos. The methods also include obtaining MEVs endogenously loaded with the heterologous cargo, produced, and loaded by the genetically engineered producer cells. The cargo includes any molecule for whom delivery into or onto an animal, including man is desired. Generally, the cargo is or contains or provides a bioactive molecule product, including biopolymers. The biopolymers are naturally occurring, or modified. The heterologous cargo includes a small peptide, a protein, or a nucleic acid. In some embodiments the MEVs are produced by genetically engineered Chlorella, such as, but not limited to a species of Chlorella selected from among Chlorella ellipsoidea, Chlorella pyrenoidosa, Chlorella sorokiniana, Chlorella vulgaris, and Chlorella variabilis. The endo-loaded MEVs produced by the methods and any of the endo-loaded MEVs provided herein, including the compositions containing the MEVs can be used in one or more of a method of diagnosis, or as vaccine, or therapy for treatment, or diagnosis of a disease, or treatment of a disease or condition, or for cosmetic uses, or for industrial uses, or any use known to those of skill in the art.

[0040] The endo-loaded MEVs can be used in any such method, which include methods of treatment of a disease, disorder, or conditions. Exemplary of diseases, disorders, and conditions is cancer, such as a cancer comprising a solid tumor or a hematological malignancy, or metastases thereof. Other diseases, disorders, and conditions include those of or involving the respiratory system, of or involving the central nervous system or the nervous system, of or involving the skin and exposed epithelia or mucosa, of or involving the digestive tract, of or involving an infectious agent. Infectious agents include bacteria, viruses, parasites, prions, oomycetes, and fungi.

[0041] The heterologous cargo can provide therapeutic molecules for treatment or can induce an immune response to serve as a vaccine for treating or preventing (reducing the risk of developing or reducing the symptoms, sequela, and/or consequences of) a disease, disorder, or condition. For example, the endo-loaded MEVs can contain a cargo that comprises an immunostimulatory protein or an antigen or encodes an immunostimulatory protein or antigen, whereby the endo-loaded MEVs, upon administration are immune-stimulating and elicit an innate or adaptive immune response, or the endo-loaded MEVs and/or the cargo can elicit an immune-protective response to prevent or treat a disease or condition. The endo-loaded MEVs can be used to treat a disease, disorder, or condition resulting from trauma. Trauma includes, but is not limited to, trauma from or involving wounds, burns, surgery, skin cuts, broken bones, hair loss, dermis exposure, mucosal exposure, fibrosis, lacerations, and ulcerations. The endo-loaded MEVs can be used to elicit an effect to treat a condition resulting from natural aging, or pathogenic or disease or otherwise induced aging. Other diseases, disorders, and conditions that can be treated by the endo-loaded MEVs, are diseases, disorders, and conditions of the skin or the eye. These include dermatitis, wrinkles and/or other age-related changes in the skin, macular degeneration, glaucoma, diabetic retinopathies, cataracts, or conditions resulting from diabetic retinopathy.

[0042] The compositions containing the endo-loaded MEVs can be formulated for administration by any route of administration. Routes, include, but are not limited to, local, systemic, topical, parenteral, enteral, mucosal, aerosols for inhalation into the lung or intranasal, parenteral, enteral, vaginal, rectal, aural, oral, nasal, and other routes of administration. The endo-loaded MEVs can be formulated in any form, including as a tablet, as a liquid, such as an emulsion, as a powder, as a cream, as a gel, for oral administration, for nebulization, or for inhalation.

[0043] The compositions or endo-loaded MEVs can be used for any of the methods and treatments described herein or known to those of skill in the art. Methods include, for example, any described herein, for use for one or more of gene silencing, gene interference, gene therapy, gene/protein overexpression, gene editing, inhibition or stimulation of protein activity, and pathway signaling. The compositions and endo-loaded MEVs can be used for prophylaxis and/or vaccination. They can be used for dermatological applications, and for cosmetic applications. They can be used for industrial purposes, for example for manufacturing, characterization, and calibration.

[0044] The MEVs provided herein have unique biodistribution patterns, which are a function of the route of administration. Biodistribution of the MEVs is different from mammalian EVs and other EVs and/or nanoparticles. For example, systemically delivered mammalian EVs accumulate in the liver, kidneys and spleen. Some mammalian-derived secreted EVs have limited pharmaceutical acceptability (see, e.g., International PCT Publication No. WO2021/122880). While others have shown that certain photosynthetic microalgae release EVs into growth medium, there is no description or understanding of the use of such EVs as drugs or as drug delivery vehicles; there is no description of or understanding of their fate upon administration. It is shown herein that MEVs upon administration via various routes are distributed to organs and tissues differently from mammalian EVs. As one example, while mammalian EVs, with the exception of bovine milk EVs, cannot be administered orally because they do not survive the harsh environment of the stomach, MEVs can be orally administered and delivered to the intestine, from where they traffic to the spleen, including the white spleen. It is shown herein, for example, that intranasally administered MEVs follow unique trafficking patterns and traffic to specific areas of the brain.

[0045] As shown and described herein, MEVs, upon intranasal (IN) administration, traverse unique pathways to the brain. Upon IN administration, the MEVs are internalized by olfactory sensory neurons (OSN) from where they travel to the glomeruli. MEVs arriving to the glomeruli from the olfactory sensory neurons (OSN) enter the mitral neurons and tufted neurons and travel intracellularly following a clear pathway with clear kinetics throughout the lateral olfactory tract (LOT). LOTs are composed of the long axons of mitral and tufted neurons that travel from the olfactory bulb (OB) to various anterior-posterior brain regions directly involved in the olfactory network of connections, which include the: anterior olfactory nucleus, olfactory tubercle, tenia tecta, piriform cortex, amygdala, and entorhinal cortex. Lateral ramifications of the main long axons of the mitral/tufted neurons enter and colonize each of the brain regions, the anterior olfactory nucleus, olfactory tubercle, tenia tecta, piriform cortex, amygdala, and entorhinal cortex. Inside these regions, the mitral/tufted axons are connected (via synapses) with neurons from other regions (having a more secondary olfactory role), including the frontal cortex, the hypothalamus, the thalamus, and the hippocampus.

[0046] Regions reached by MEVs via IN administration reach all and each of the brain regions connected to the olfactory nerve and the lateral olfactory tract (LOT) in both hemispheres; ventral, lateral and dorsal regions; external and internal regions; along the antero-posterior axis. These regions are: the anterior olfactory nucleus, the olfactory tubercle, the tenia tecta, the piriform cortex, the amygdala, the entorhinal cortex, the primary motor cortex, the frontal cortex, the agranular insular cortex, the primary somatosensory cortex, the auditory cortex, the retrosplenial granular cortex, the temporal association cortex, the basolateral amygdaloid nucleus, the arcuated hypothalamic, the corpus callosum, the internal capsule, the thalamus, and the hippocampus (fimbria, dentata gyrus).

[0047] The MEVs are endogenously loaded with a variety of cargos (also referred to as “payloads”), including, but not limited to, DNA, RNA, such as inhibitory RNAs and other RNA products, oligonucleotides, plasmids, peptides, and proteins as detailed herein. As shown and described herein, the MEVs can deliver the cargo to organs, tissues, and cells, and can be targeted by the route of delivery, where they can be delivered. It is shown herein that the MEVs, including the Chlorella MEVs, have a striking capacity to pass through stringent natural barriers, such as the digestive tract, and olfactory neurons, that are not shared by other extracellular vesicles (EVs) from other sources, including mammalian EVs.

[0048] The MEVs can be considered or used as drug delivery systems that comprise the MEVs or compositions containing the MEVs formulated for delivery by a particular route of administration. As shown herein, following administration, MEVs traffic by different paths ending up in different organs and/or tissues depending upon the route of administration. The MEVs, thus, are drug delivery systems formulated for administration that targets or delivers to tissue or organs involved in a disease, disorder, or condition, such that the cargo can treat the disease, disorder, or condition. The drug delivery systems thus link a tissues and organs, cargo, route of administration, and formulation. Details, described below and in the claims, of such systems are discussed below.

[0049] All of the claims are incorporated by reference into this section.

### BRIEF DESCRIPTION OF THE DRAWINGS

[0050] FIGS. 1A and 1B. FIG. 1A depicts the profile of light intensity (in μmol/m²/s) across time (in days) used in the HECTOR photobioreactor cultures of Chlorella; FIG. 1B shows an elution profile for purification of MEVs by size exclusion chromatography (SEC).

[0051] FIG. 2 depicts the in vivo full body imaging of a representative animal after intravenous administration as described in Example 10A.

[0052] FIG. 3 depicts the in vivo full body imaging of a representative animal per os (oral) administration as described in Example 10A.

[0053] FIG. 4 depicts the in vivo full body imaging of a representative animal after intranasal administration as described in Example 10A. As discussed in the Example, and shown in subsequent Examples, MEVs, upon intranasal administration, traffic to the brain. The high volume administered intranasally went to other passages in addition to nasal.

[0054] FIG. 5 depicts the in vivo full body imaging of a representative animal after intratracheal administration as described in Example 10A.

[0055] FIG. 6 depicts the kinetics of accumulation in liver, spleen, brain, and kidneys (average of 6 animals) after intravenous administration, as described in Example 10A.

[0056] FIG. 7 depicts the kinetics of accumulation in liver, spleen, intestine, and kidneys (average of 6 animals) per os administration, as described in Example 10A.

[0057] FIG. 8 depicts the kinetics of accumulation in the lungs and kidneys (average of 4 animals) after intranasal administration, as described in Example 10A.

[0058] FIG. 9 depicts the kinetics of accumulation in the lungs and kidneys (average of 3 animals) after intratracheal administration, as described in Example 10A.

[0059] FIGS. 10A-10D depict ex vivo fluorescence analysis (total radiant efficiency) in organs [10A) liver; 10B) spleen; 10C) lungs; and 10D) brain]isolated 3 days after intravenous (IV), intranasal (IN), per os (PO), and intratracheal (IT) administration.

[0060] FIG. 11 depicts the structure of the T-DNA (transferred DNA) portion of the Ti plasmids provided herein. Plasmid sequences, as depicted in the figure, are written from LB (left border of the T-DNA (transferred DNA) element in the Ti plasmid) to RB (right border of the T-DNA element).

[0061] FIGS. 12A and 12B depict the blood-brain barrier.

[0062] FIG. 13 is a schematic that depicts routes for passage through the olfactory epithelium.

[0063] FIG. 14 shows a positive control Dir-MEV on DAPI-stained brain slice: a drop of MEV suspension deposited on top of a brain tissue slide. Puncta are Dir-labeled MEV.

[0064] FIG. 15 is a schematic of the Insula and its connections (reproduced from Gogolla (2017) “The insular cortex,” Current Biology 27 (12): R580-R586.

[0065] FIG. 16 is a schematic diagram of brain neuronal pathway from the olfactory sensory neurons (OSN) through the olfactory bulb (OB) to the mitral and tufted neurons, to the olfactory tract (OT).

[0066] FIG. 17 is a schematic showing the pathways and approximate average distances from the olfactory and respiratory epithelium to CNS targets (reproduced from Lochhead et al. (2019). “Perivascular and Perineural Pathways Involved in Brain Delivery and Distribution of Drugs after Intranasal Administration” Pharmaceutics 11 (11): 598, doi.org/10.3390/pharmaceutics11110598).

[0067] FIG. 18 is a schematic of a cortical projection of mitral and tufted cells showing a ventrolateral view of the brain (reproduced from Imai (2014) “Construction of functional neuronal circuitry in the olfactory bulb,” Seminars in Cell and Developmental Biology 35, DOI: 10.1016/j.semcdb.2014.07.012).

[0068] FIG. 19 shows transport of MEVs via olfactory pathway. After IN administration, MEVs are taken by the olfactory epithelium transported by axonal transport by olfactory neurons to the olfactory bulb then by mitral and tufted neurons to the primary olfactory regions that process the olfactory signal (reproduced from Selvaraj et al. (2018) Artificial Cells, Nanomedicine, and Biotechnology An International Journal 46:2088-2095, doi.org/10.1080/21691401.2017.1420073).

[0069] FIG. 20 depicts the olfactive pathway used by MEVs after IN administration (schematic of the general pathway reproduced from “What-when-how in Depth tutorials and information, Olfaction and Taste, Sensory system, part 1” (what-when-how.com)).

[0070] FIGS. 21A-21G: FIG. 21A depicts a general overview of the experimental design of brain biodistribution studies. FIG. 21B depicts the position of the 5 brain sections studied; FIG. 21C depicts the regions analyzed to determine the PK and biodistribution of MEVs in each of the 5 brain sections studied. FIGS. 21D-21G depict and identify regions of the brain for reference with the following figures that show MEVs in the brain following IN administration.

[0071] FIGS. 22A-22D show the pharmacokinetic (PK) and biodistribution of MEVs in different regions of section 1 from FIG. 21. Images of labelled-MEVs with DiR are the black dots.

[0072] FIG. 23 shows the PK and biodistribution of MEVs in different regions of section 1, providing a graphical representation of the total number of labelled MEVs with DiR spots per surface of regions of section 1, normalized by total analyzed area.

[0073] FIGS. 24A-24D show the PK and biodistribution of MEVs in different regions of section 2 (showing images of labelled-MEVs with DiR).

[0074] FIGS. 25A-25D show the PK and biodistribution of MEVs in different regions of section 2 as a graphical representation of the total number of labelled MEVs with DiR spots per surface of regions of section 2, normalized by total analyzed area.

[0075] FIGS. 26A-26D show the PK and biodistribution of MEVs in different regions of section 3; images of DiR-labelled MEVs.

[0076] FIGS. 27A-27F show the PK and biodistribution of MEVs in different regions of section 3 in a graphical representation of total number of labelled MEVs with DiR spots per surface of regions of section 3, normalized by total analyzed area.

[0077] FIGS. 28A-28D show the PK and biodistribution of MEVs in different regions of section 4 as images of MEVs labelled with DiR.

[0078] FIGS. 29A-29F show the PK and biodistribution of MEVs in different regions of section 4, providing a graphical representation of total number of labelled MEVs with DiR spots per surface of regions of section 4, normalized by total analyzed area.

[0079] FIGS. 30A-30D show the PK and biodistribution of MEVs in different regions of section 5 as images of DiR-labelled MEVs.

[0080] FIGS. 31A and 31B show the kinetics of brain penetration by the MEVs, from the rostral to the distal parts of the brain.

[0081] FIGS. 32A-32E show the biodistribution of MEVs in vivo following per os (PO) administration. FIG. 32A depicts Hematoxylin & Eosin staining of intestine (G=GALT tissue). FIG. 32B depicts DAPI (nuclei) staining and MEV-PKH26 fluorescence (see ro) showing the MEVs in GALT cells (macrophages and dendritic cells). FIG. 32C depicts the INTESTINAL MUCOSA stained with DAPI (for nuclei) and MEV-PKH26 (fluorescence/lighter gray bright puncta) showing the MEVs in the ENTEROCYTES. FIG. 32D depicts the SPLEEN pulp stained with DAPI (for nuclei) and MEV-PKH26 (fluorescence/lighter gray bright puncta). FIG. 32E is a diagram showing the migration of MEVs from the GALT to the spleen.

[0082] FIG. 33 shows whole-body bioluminescence imaging of a representative animal treated with MEVs loaded with luciferase mRNA.

[0083] FIG. 34 depicts whole-body bioluminescence imaging of a representative animal treated with MEVs loaded with luciferase enzyme.

[0084] FIG. 35 depicts image analysis using the Incucyte® live cell analyzer.

[0085] FIGS. 36A-36I show results of assessment of toxicity of MEVs in a mouse model after oral (PO) or intratracheal (IT) administration at different doses in 4 groups of mice for each parameter. MEV toxicity was evaluated by chemistry parameters: ALAT, ASAT, urea, and creatine (FIGS. 36A-D, respectively); and 2) by hematology parameters: red blood cells, hemoglobin, hematocrit, MCV and eosinophils (FIGS. 36E-I, respectively). The groups were: Group 1 mice administered 100 μl of PBS (white bars) by PO delivery; Group 2 mice were administered 100 μl of 4*10¹¹ MEV/mouse by PO delivery (white bar with black dots); Group 3 mice were administered 100 μl of 4*10¹² MEV/mouse by PO delivery (white bars with vertical lines); Group 4 mice were administered 100 μl of 4*10¹¹ MEV/mouse by IT delivery (squared bars). Data were measured for six mice per group for each parameter. FIG. 36A shows ALAT: Alanine Aminotransferase; FIG. 36B shows ASAT: Aspartate Aminotransferase; FIG. 36C shows urea; FIG. 36D shows creatine; FIG. 36E shows red blood cells; FIG. 36F shows hemoglobin; FIG. 36G shows hematocrit; FIG. 36H shows MCV (Mean Corpuscular Volume); and FIG. 36I shows eosinophils. PO designates per os (oral delivery) and IT designates Intratracheal administration.

[0086] FIG. 37 shows confocal microscopy of Hep-G2 cells including GFP protein expression in Hep-G2 cells after 24 h incubation with MEVs loaded with GFP-protein (MEV-GFP) or MEVs loaded with mRNA-eGFP (MEV-mRNA).

[0087] FIG. 38 shows confocal microscopy of Huh7 cells including GFP protein expression in Huh7 cells after 24 h incubation with MEVs loaded with GFP-protein (MEV-GFP) or MEVs loaded with mRNA-eGFP (MEV-mRNA).

[0088] FIG. 39 depicts in vivo delivery and expression of mRNA after topical instillation of MEVs into the eyes in rabbits.

[0089] FIG. 40 provides representative patterns of biodistribution according to the route of administration, for the Intravenous (IV), Intratracheal (IT) and Per os (PO) routes as described in Example 10A.

### DETAILED DESCRIPTION

### Outline

[0090] A. DEFINITIONS
[0091] B. MICROALGAE AND OVERVIEW
[0092] C. EXTRACELLULAR VESICLES
   [0093] 1. Types of Extracellular Vesicles (EVs)
      [0094] a. Exosomes
      [0095] b. Microvesicles
      [0096] c. Apoptotic Bodies
   [0097] 2. Uptake of EVs
   [0098] 3. General Methods for Isolating EVs
      [0099] a. Ultracentrifugation (UC)
      [0100] b. Size-Based Techniques
      [0101] c. Immunoaffinity Capture-Based Techniques
      [0102] d. Exosome Precipitation
      [0103] e. Microfluidic Based Isolation Techniques
   [0104] 4. Microalgae-Derived Extracellular Vesicles (MEVs)
   [0105] 5. Green algae-Chlorella species
      [0106] a. Life Cycle
      [0107] b. Genomic Analyses of Chlorella Species
      [0108] c. Commercial and Biotechnological Uses of Chlorella
      [0109] d. Chlorella MEVs
[0110] D. ENDOGENOUSLY LOADED (ENDO-LOADED) MICROALGAE EXTRACELLULAR VESICLES (MEVS), HETEROLOGOUS CARGO, AND TARGETS
   [0111] 1. Choice and preparation of Cargo
   [0112] 2. Genetic engineering of producer cells
   [0113] 3. Isolation of MEVs
   [0114] 4. Exemplary Heterologous Cargo and Exemplary Uses of the Endogenously Loaded MEVs
      [0115] a. Heterologous Cargo
         [0116] 1) RNA Cargo and nucleic acid cargo
         [0117] 2) Protein Cargo
      [0118] b. Diseases and Methods of Treatment
      [0119] c. Cosmetic and Dermatological Applications
[0120] E. PHARMACEUTICAL COMPOSITIONS, FORMULATIONS, KITS, ARTICLES OF MANUFACTURE, AND COMBINATIONS, AND DRUG DELIVERY SYSTEMS
   [0121] 1. Pharmaceutical Compositions and Formulations
   [0122] 2. Articles of Manufacture/Kits and Combinations
   [0123] 3. Administration of Endogenously Loaded MEVs and Routes of Administration
   [0124] 4. Drug Delivery Systems
   [0125] 5. Combination Therapies
[0126] F. BIODISTRIBUTION OF MEVs FOLLOWING ADMINISTRATION VIA VARIOUS ROUTES
   [0127] 1. Biodistribution of mammalian EVs
   [0128] 2. Microalgae EVs Biodistribution
      [0129] a. Oral Administration
         [0130] 1) Components of the Lymphatic System
         [0131] 2) Targeting GALT
   [0132] 3. Diseases and conditions treated by MEVs
[0133] G. FORMULATIONS, ROUTES OF ADMINISTRATION, AND DISEASE AND DISORDERS
[0134] H. BIODISTRIBUTION AND DELIVERY OF MEVs TO THE BRAIN VIA INTRANASAL (IN) ADMINISTRATION FOR TREATING DISEASES, DISORDERS, AND CONDITIONS OF THE BRAIN AND CNS
   [0135] 1. Brain structure
      [0136] a. Anterior Olfactory Nucleus
      [0137] b. Tenia Tecta
      [0138] c. Olfactory Tubercle
      [0139] d. Piriform Cortex
      [0140] e. Amygdala
      [0141] f. Entorhinal Cortex
      [0142] g. Frontal Cortex
      [0143] h. Striatum: caudate nucleus and putamen
      [0144] i. Nucleus accumbens
      [0145] j. Thalamus
      [0146] k. Hypothalamus
      [0147] l. Substantia nigra pars compacta
      [0148] m. Hippocampus
      [0149] n. Colliculus
      [0150] o. Pontine Raphe nuclei
   [0151] 2. The Blood-Brain Barrier
   [0152] 3. Brain and target cells
   [0153] 4. Differences between Biodistribution of MEVs and other delivery vehicles
   [0154] 5. Intranasal administration
   [0155] 6. MEVs and delivery to the brain following intranasal administration
   [0156] 7. Trafficking and biodistribution of MEVs following intranasal (IN) administration
   [0157] 8. Primary and secondary circuitry of the olfactory system and regions reached by the MEVs upon IN administration
   [0158] 9. Delivery of MEVs via IN administration to the brain-exemplary bioactive cargo and uses thereof
[0159] I. MEV-MEDIATED INTRACELLULAR SIGNALING
[0160] J. EXAMPLES

### A. Definitions

[0161] Unless defined otherwise, all technical and scientific terms used herein have the same meaning as is commonly understood by one of skill in the art to which the invention(s) belong. All patents, patent applications, published applications and publications, GenBank sequences, databases, websites and other published materials referred to throughout the entire disclosure herein, unless noted otherwise, are incorporated by reference in their entirety. In the event that there is a plurality of definitions for terms herein, those in this section prevail. Where reference is made to a URL or other such identifier or address, it is understood that such identifiers can change and particular information on the internet can come and go, but equivalent information can be found by searching the internet. Reference thereto evidences the availability and public dissemination of such information.

[0162] As used herein, cargo refers to any heterologous molecules, such as bioactive molecules, including biomolecules, that are either (1) endogenously loaded (by the microalgae) into the extracellular vesicles (MEVs) produced by the genetically-modified microalgae, engineered to express the heterologous cargo and to load it into the MEVs prior to the secretion of the MEVs by the producer cell; or (2) exogenously loaded (by man) into the extracellular vesicles (MEVs) produced by the microalgae, following the isolation and purification of said MEVs.

[0163] As used herein, microalgae producer cells are genetically-modified (used interchangeably with genetically engineered) microalgae cells that have been engineered, such as by introduction of a plasmid, to encode a heterologous product. The genetically-modified microalgae then can stably produce the product and package it in MEVs generated in the microalgae.

[0164] As used herein, endogenous cargo, refers to cargo in the endogenously-loaded (endo-loaded) MEVs that is loaded into the microalgae extracellular vesicles (MEVs) provided herein inside the producing cell by the microalgae natural or modified pathways and before the MEVs have been isolated. For purposes herein, the MEVs that are loaded with endogenous cargo are referred to as “endo-loaded or “endo loaded.” The cargo is referred to as endogenous cargo since it is endogenously-loaded by the microalgae that produce the cargo and the MEVs loaded with the cargo. Endo-loaded MEVs, are MEVs that contain heterologous cargo that is produced in (and loaded by) the genetically-modified microalgae cell that produces the MEVs. Endogenous cargo is cargo that, generally is heterologous, to the microalgae. The endo-loaded MEVs can contain molecules that are naturally produced in the microalgae, but the cargo generally is heterologous (to the microalgae) but produced by the microalgae upon genetic engineering to create a producer cell or producer cell line. The MEVs can contain endo-loaded and exogenously loaded (exo-loaded) cargo.

[0165] As used herein, cargo that is heterologous to the microalgae refers to cargo that is not produced by the microalgae in nature or prior to introduction of nucleic acid encoding the product, or to product produced by genetically modifying the microalgae to produce more of the produce, such as by introducing an additional copy of nucleic acid encoding a product or linking its expression to regulatory sequences that result in higher levels of expression of the product. The microalgae is modified, such as by introducing a plasmid into the microalgae that encodes a product, or by mutation of the genome of the microalgae, or other method by which the microalgae produce a product of interest in sufficient amounts to be packaged in endo-loaded MEVs produced from the microalgae.

[0166] As used herein, exogenous cargo refers to cargo loaded after the MEVs are produced and isolated or partially isolated sufficiently for introduction of exogenous cargo.

[0167] As used herein, a bioactive molecule refers to any molecule that can have a biological activity or that can act in vivo on a subject. Bioactive molecules include biomolecules, such as RNA, proteins, and any suitable molecules that would be delivered to a subject, such as a human or other animal or a plant or a microorganism (bacteria or other), in connection with a therapy, a diagnostic, or other such uses, such as a cosmetic or a vaccine. The biomolecule can function as or have an activity as, for example, a therapeutic, an immunogen, a diagnostic, a detectable marker, or a cosmetic. The bioactive molecules for use herein are any that can be endogenously loaded by the genetically-modified microalgae itself into the microalgae extracellular vesicles (MEV).

[0168] As used herein, a biomolecule refers to any biologically active biopolymer or molecule that occurs, or can occur, in a living organism or virus or that is a modified form of such biopolymer or molecule. Biomolecules, thus, include modified naturally-occurring biomolecules, such as, for example proteins that include a modified primary sequence, such as by deletions, insertions, and/or replacements of amino acids to alter the primary sequence, and or by modification, such as post-translational modifications of the protein.

[0169] As used herein, a therapeutic refers to any product that, when administered, results in treating, preventing, reducing the risk of, or ameliorating the symptoms of, or etiology of, a disease, disorder, or condition.

[0170] As used herein, a microalgae producer cell is a genetically-modified microalgae that contains genome modifications or a plasmid, generally stably present, so that the microalgae cell is modified, such as a modification to its membranes, modification to express a selectable marker or a detectable marker or a heterologous bioactive molecule, to the constituents of its MEVs, to the products it produces. Endogenously-loaded (endo-loaded) MEVs are generated in producer cells, which are modified to express the endo-loaded product, and/or to alter the microalgae cell. Producer cells produce the MEVs, which can be endo-loaded (by the producer microalgae), or exogenously loaded (exo-loaded) (by man) or both endo- and exo-loaded.

[0171] As used herein, a subject is any organism, generally an animal, particularly humans, into which or on which the composition containing the endo-loaded MEV is administered.

[0172] As used herein, disease or disorder refers to a pathological or undesirable or undesired condition in an organism resulting from a cause or condition including, but not limited to, infections, acquired conditions, and genetic conditions, and that is characterized by identifiable symptoms.

[0173] As used herein, treating a subject with a disease or condition means that the subject's symptoms or manifestations of the disease or conditions are partially or totally alleviated, or remain static following treatment.

[0174] As used herein, treatment refers to any effects that ameliorate symptoms of a disease or disorder. Treatment encompasses prophylaxis, therapy and/or cure. Treatment also encompasses any pharmaceutical use of any endo-loaded or exo-loaded MEVs and composition provided herein. Treatment refers to any effects that ameliorate or prevent or other reduce or eliminate any symptom or manifestation of a disease or disorder. Treatment also encompasses any pharmaceutical use of any endo-loaded or exo-loaded MEV or composition provided herein.

[0175] As used herein, prophylaxis refers to prevention of a potential disease and/or a prevention of worsening of symptoms or progression of a disease. Prevention or prophylaxis, and grammatically equivalent forms thereof, refer to methods in which the risk or probability of developing a disease or condition is reduced or eliminated and products that reduce or eliminate the risk or probability of developing a disease or condition. Prevention also includes reducing the severity of the disease, disorder, and/or condition, or consequences, sequelae, or other effects of disease, disorder, and/or condition. The vaccine can be used for prophylaxis or prevention of a disease, disorder, and/or condition, and also to treat a disease, disorder, and/or condition. Such vaccines eliciting a humoral immune response, or a cellular immune response, or a combination of both, against pathogens, cancer cells, or other.

[0176] As used herein, a vaccine refers to compositions comprising the MEVs, such as the MEVs endo-loaded with a heterologous antigen (such as a small peptide, peptide, polypeptide, and protein) or antigen-producer molecule (such as a mRNA). The vaccine can be used to treat a disease or prevent (reduce the risk of getting a disease), such as for prophylaxis. Vaccines can elicit a humoral immune response, or a cellular immune response, or a combination thereof, such as against pathogens, cancer cells, immune checkpoints, and other therapeutic targets for intervention.

[0177] As used herein, a modification with reference to modification of a sequence of amino acids of a polypeptide or a sequence of nucleotides in a nucleic acid molecule refers to and includes deletions, insertions, and replacements of amino acids or nucleotides, respectively. These include modifications of the primary sequence of a polypeptide or protein. Methods of modifying a polypeptide and nucleic acid molecule are routine to those of skill in the art, such as by using recombinant DNA methodologies. Modifications, when referring to polypeptide or protein, not to a sequence, refer to post-translational changes, such as glycosylation or adding purification tags, detectable reporters, and other such moieties.

[0178] As used herein, small activating RNA (saRNA) is a small double-stranded RNA that targets a gene promoter to activate a gene. They are generally small, generally 21 nucleotides long. They are structurally similar to siRNA, but the activity of the saRNA is to activate expression; whereas siRNA inhibits expression of its target.

[0179] As used herein, self-amplifying RNA refers to RNA that encodes a viral replicase. Upon entry into a host cell, the replicase is translated, which makes a complementary negative copy of the mRNA, which then is used by the replicase as a template to synthesize more mRNA.

[0180] As used herein, non-coding RNA is RNA that does not encode a protein. Classes of non-coding RNA, include, but are not limited to, RNAi, such as small interfering RNA (siRNA) and microRNA (miRNA). Also included long noncoding RNAs (lncRNAs).

[0181] As used herein, an open reading frame (ORF) is sequence of nucleotides that encodes a start codon followed by a downstream in-frame stop codon. Eukaryotic mRNA predominantly have a single primary ORF and comprises the protein coding sequence (CDS). Shorter ORFs also can occur in the transcript. These are called small ORFs (sORFs).

[0182] As used herein, small ORF-encoded peptides (sORFs) occur in non-coding RNA, including in long non-coding RNA (lncRNA), circular RNA, and ribosomal RNA. sORFs encode proteins, small peptides and peptides that are generally less than 100 amino acids. sORFs can include an AUG canonical start codon, but also can include near-cognate codons, such CUG, GUG, UUG, and ACG, that differ from AUG by one nucleotide; sORFs generally terminate with a stop codon (UAA, UGA, and UAG). Many of the products encoded by sORFs have regulatory functions, such as modulating ribosomal RNA.

[0183] As used herein, RNA interference (RNAi) is a biological process in which RNA molecules inhibit gene expression or translation, by neutralizing targeted mRNA molecules to inhibit translation and thereby expression of a targeted gene.

[0184] As used herein, RNA molecules that act via RNAi are referred to as inhibitory by virtue of their silencing of expression of a targeted gene. Silencing expression means that expression of the targeted gene is reduced or suppressed or inhibited.

[0185] As used herein, gene silencing via inhibitor RNA, RNAi, inhibits, suppresses, disrupts, and/or silence expression of a gene with which the RNAi interacts (i.e., a targeted gene). A targeted gene contains sequences of nucleotides that correspond to or are complementary to sequences in the inhibitory RNA, whereby the inhibitory RNA silences expression of encoded mRNA. RNAi includes small interfering RNA (siRNA).

[0186] As used herein, long RNA is an RNA molecule that can be enzymatically processed into shorter RNAs, such as short-hairpin RNA (shRNA), micro-RNA, and other RNAs that inhibit or silence expression of mRNA or is long noncoding RNA (lncRNA). For example, small interfering RNAs (siRNAs) are small pieces of double-stranded (ds) RNA, usually about 18-23 nucleotides long, with 3′ overhangs (2 nucleotides) at each end that can interfere with the translation of proteins by binding to and promoting the degradation of messenger RNA (mRNA) at specific sequences. In doing so, siRNAs prevent the production of specific proteins based on the nucleotide sequences of their corresponding mRNAs. The process is called RNA interference (RNAi), and also is referred to as siRNA silencing or siRNA knockdown. A short-hairpin RNA or small-hairpin RNA (shRNA) is an artificial RNA molecule with a tight hairpin turn that can be used to silence target gene expression via RNA interference (RNAi). Expression of shRNA in cells can be accomplished by delivery of plasmids or through viral or bacterial vectors.

[0187] As used herein, inhibiting, suppressing, disrupting or silencing a targeted gene refers to processes that alter expression, such as translation, of the targeted gene, whereby activity or expression of the product encoded by the targeted gene is reduced. Reduction includes a complete knock-out or a partial knockout, whereby, with reference to the MEVs provided herein and administration herein, treatment is effected.

[0188] As used herein, coding RNA is RNA that encodes a protein, polypeptide, peptide or small Open Reading Frame (sORFs) or a small peptide, generally 10 or fewer amino acids, or peptides (less than hundred amino acids). Classes of coding RNA, include, but are not limited to, mRNA or messenger RNAs that code for proteins and peptides, and long noncoding RNAs (lncRNAs) that encode a sORF encoding a small peptides or peptides.

[0189] As used herein, a tumor microenvironment (TME) is the cellular environment in which the tumor exists, including surrounding blood vessels, immune cells, fibroblasts, bone marrow-derived inflammatory cells, lymphocytes, signaling molecules and the extracellular matrix (ECM). Conditions that exist include, but are not limited to, increased vascularization, hypoxia, low pH, increased lactate concentration, increased pyruvate concentration, increased interstitial fluid pressure and altered metabolites or metabolism, such as higher levels of adenosine, indicative of a tumor.

[0190] As used herein, recitation that a nucleic acid or encoded RNA targets a gene means that it inhibits or suppresses or silences expression of the gene by any mechanism. Generally, such nucleic acid includes at least a portion complementary to the targeted gene, where the portion is sufficient to form a hybrid with the complementary portion.

[0191] As used herein, deletion, when referring to a nucleic acid or polypeptide sequence, refers to the deletion of one or more nucleotides or amino acids compared to a sequence, such as a target polynucleotide or polypeptide or a native or wild-type sequence.

[0192] As used herein, insertion, when referring to a nucleic acid or amino acid sequence, describes the inclusion of one or more additional nucleotides or amino acids, within a target, native, wild-type or other related sequence. Thus, a nucleic acid molecule that contains one or more insertions compared to a wild-type sequence, contains one or more additional nucleotides within the linear length of the sequence.

[0193] As used herein, additions to nucleic acid and amino acid sequences describe addition of nucleotides or amino acids onto either termini compared to another sequence.

[0194] As used herein, substitution or replacement refers to the replacing of one or more nucleotides or amino acids in a native, target, wild-type or other nucleic acid or polypeptide sequence with an alternative nucleotide or amino acid, without changing the length (as described in numbers of residues) of the molecule. Thus, one or more substitutions in a molecule does not change the number of amino acid residues or nucleotides of the molecule. Amino acid replacements compared to a particular polypeptide can be expressed in terms of the number of the amino acid residue along the length of the polypeptide sequence.

[0195] As used herein, at a position corresponding to, or a recitation that nucleotides or amino acid positions correspond to nucleotides or amino acid positions in a disclosed sequence, such as set forth in the Sequence Listing, refers to nucleotides or amino acid positions identified upon alignment with the disclosed sequence to maximize identity using a standard alignment algorithm, such as the GAP algorithm. By aligning the sequences, one skilled in the art can identify corresponding residues, for example, using conserved and identical amino acid residues as guides. In general, to identify corresponding positions, the sequences of amino acids are aligned so that the highest order match is obtained (see, e.g., Computational Molecular Biology, Lesk, A.M., ed., Oxford University Press, New York, 1988; Biocomputing: Informatics and Genome Projects, Smith, D. W., ed., Academic Press, New York, 1993; Computer Analysis of Sequence Data, Part I, Griffin, A. M., and Griffin, H. G., eds., Humana Press, New Jersey, 1994; Sequence Analysis in Molecular Biology, von Heinje, G., Academic Press, 1987; Sequence Analysis Primer, Gribskov, M. and Devereux, J., eds., M Stockton Press, New York, 1991; and Carrillo et al. (1988) SIAM J Applied Math 48:1073).

[0196] As used herein, alignment of a sequence refers to the use of homology to align two or more sequences of nucleotides or amino acids. Typically, two or more sequences that are related by 50% or more identity are aligned. An aligned set of sequences refers to 2 or more sequences that are aligned at corresponding positions and can include aligning sequences derived from RNAs, such as ESTs and other CDNAs, aligned with genomic DNA sequence. Related or variant polypeptides or nucleic acid molecules can be aligned by any method known to those of skill in the art. Such methods typically maximize matches, and include methods, such as using manual alignments and by using the numerous alignment programs available (e.g., BLASTP) and others known to those of skill in the art. By aligning the sequences of polypeptides or nucleic acids, one skilled in the art can identify analogous portions or positions, using conserved and identical amino acid residues as guides. Further, one skilled in the art also can employ conserved amino acid or nucleotide residues as guides to find corresponding amino acid or nucleotide residues between and among human and non-human sequences. Corresponding positions also can be based on structural alignments, for example by using computer simulated alignments of protein structure. In other instances, corresponding regions can be identified. One skilled in the art also can employ conserved amino acid residues as guides to find corresponding amino acid residues between and among human and non-human sequences.

[0197] As used herein, a property of a polypeptide, such as an antibody, refers to any property exhibited by a polypeptide, including, but not limited to, binding specificity, structural configuration or conformation, protein stability, resistance to proteolysis, conformational stability, thermal tolerance, and tolerance to pH conditions. Changes in properties can alter an activity of the polypeptide. For example, a change in the binding specificity of the antibody polypeptide can alter the ability to bind an antigen, and/or various binding activities, such as affinity or avidity, or in vivo activities of the polypeptide.

[0198] As used herein, an activity or a functional activity of a polypeptide, such as an antibody, refers to any activity exhibited by the polypeptide. Such activities can be empirically determined. Exemplary activities include, but are not limited to, ability to interact with a biomolecule, for example, through antigen-binding, DNA binding, ligand binding, or dimerization, or enzymatic activity, for example, kinase activity or proteolytic activity. For an antibody (including antibody fragments), activities include, but are not limited to, the ability to specifically bind a particular antigen, affinity of antigen-binding (e.g., high or low affinity), avidity of antigen-binding (e.g., high or low avidity), on-rate, off-rate, effector functions, such as the ability to promote antigen neutralization or clearance, virus neutralization, and in vivo activities, such as the ability to prevent infection or invasion of a pathogen, or to promote clearance, or to penetrate a particular tissue or fluid or cell in the body. Activity can be assessed in vitro or in vivo using recognized assays, such as ELISA, flow cytometry, surface plasmon resonance or equivalent assays to measure on- or off-rate, immunohistochemistry and immunofluorescence histology and microscopy, cell-based assays, flow cytometry and binding assays (e.g., panning assays).

[0199] As used herein, bind, bound, and grammatical variations thereof refers to the participation of a molecule in any interaction with another molecule or among molecules, resulting in a stable association in which the molecules are in close proximity to one another. Binding includes, but is not limited to, non-covalent bonds, covalent bonds (such as reversible and irreversible covalent bonds), and includes interactions between molecules such as, but not limited to, proteins, nucleic acids, carbohydrates, lipids, and small molecules, such as chemical compounds including drugs.

[0200] As used herein, antibody refers to immunoglobulins and immunoglobulin fragments, whether natural or partially or wholly synthetically, such as recombinantly produced, including any fragment thereof containing at least a portion of the variable heavy chain and light region of the immunoglobulin molecule that is sufficient to form an antigen binding site and, when assembled, to specifically bind an antigen. Hence, an antibody includes any protein having a binding domain that is homologous or substantially homologous to an immunoglobulin antigen-binding domain (antibody combining site). For example, an antibody refers to an antibody that contains two heavy chains (which can be denoted H and H′) and two light chains (which can be denoted L and L′), where each heavy chain can be a full-length immunoglobulin heavy chain or a portion thereof sufficient to form an antigen binding site (e.g., heavy chains include, but are not limited to, VH chains, VH-CHI chains and VH-CHI-CH2-CH3 chains), and each light chain can be a full-length light chain or a portion thereof sufficient to form an antigen binding site (e.g., light chains include, but are not limited to, VL chains and VL-CL chains). Each heavy chain (H and H′) pairs with one light chain (L and L′, respectively). Typically, antibodies minimally include all or at least a portion of the variable heavy (VH) chain and/or the variable light (VL) chain. The antibody also can include all or a portion of the constant region.

[0201] For purposes herein, the term antibody includes full-length antibodies and portions thereof including antibody fragments, such as anti-tumor antibody or anti-pathogen or gene silencing fragments. Antibody fragments, include, but are not limited to, Fab fragments, Fab′ fragments, F(ab′) 2 fragments, Fv fragments, disulfide-linked Fvs (dsFv), Fd fragments, Fd′ fragments, single-chain Fvs (scFv), single-chain Fabs (scFab), diabodies, anti-idiotypic (anti-Id) antibodies, or antigen-binding fragments of any of the above. Antibody also includes synthetic antibodies, recombinantly produced antibodies, multispecific antibodies (e.g., bispecific antibodies), human antibodies, non-human antibodies, humanized antibodies, chimeric antibodies, and intrabodies. Antibodies provided herein include members of any immunoglobulin class (e.g., IgG, IgM, IgD, IgE, IgA and IgY), any subclass (e.g., IgG1, IgG2, IgG3, IgG4, IgA1 and IgA2) or sub-subclass (e.g., IgG2a and IgG2b).

[0202] As used herein, sORF refers to a small open reading frame encoding a small polypeptide fewer than 100 amino acids. sORFs include longer sORF of around 80 amino acid long that resemble canonical proteins, and dwarf sORFs that, in general, are about 20 amino acids or as few as 3 or 4 amino acids.

[0203] As used herein, nucleic acid refers to at least two linked nucleotides or nucleotide derivatives, including a deoxyribonucleic acid (DNA) and a ribonucleic acid (RNA), joined together, typically by phosphodiester linkages. Also included in the term nucleic acid are analogs of nucleic acids such as peptide nucleic acid (PNA), phosphorothioate DNA, and other such analogs and derivatives or combinations thereof. Nucleic acids also include DNA and RNA derivatives containing, for example, a nucleotide analog or a backbone bond other than a phosphodiester bond, for example, a phosphotriester bond, a phosphoramidate bond, a phosphorothioate bond, a thioester bond, or a peptide bond (peptide nucleic acid). The term also includes, as equivalents, derivatives, variants and analogs of either RNA or DNA made from nucleotide analogs, single-(sense or antisense) and double-stranded nucleic acids. Deoxyribonucleotides include deoxyadenosine, deoxycytidine, deoxyguanosine and deoxythymidine. For RNA, the uracil base is uridine.

[0204] As used herein, an isolated nucleic acid molecule is one which is separated from other nucleic acid molecules which are present in the natural source of the nucleic acid molecule. An isolated nucleic acid molecule, such as a cDNA molecule, can be substantially free of other cellular material, or culture medium when produced by recombinant techniques, or substantially free of chemical precursors or other chemicals when chemically synthesized. Exemplary isolated nucleic acid molecules provided herein include isolated nucleic acid molecules encoding RNAi or a therapeutic protein.

[0205] As used herein, operably linked with reference to nucleic acid sequences, regions, elements or domains means that the nucleic acid regions are functionally related to each other. For example, a nucleic acid encoding a leader peptide can be operably linked to a nucleic acid encoding a polypeptide, whereby the nucleic acids can be transcribed and translated to express a functional fusion protein, wherein the leader peptide effects secretion of the fusion polypeptide. In some instances, the nucleic acid encoding a first polypeptide (e.g., a leader peptide) is operably linked to a nucleic acid encoding a second polypeptide and the nucleic acids are transcribed as a single mRNA transcript, but translation of the mRNA transcript can result in one of two polypeptides being expressed. For example, an amber stop codon can be located between the nucleic acid encoding the first polypeptide and the nucleic acid encoding the second polypeptide, such that, when introduced into a partial amber suppressor cell, the resulting single mRNA transcript can be translated to produce either a fusion protein containing the first and second polypeptides, or can be translated to produce only the first polypeptide. In another example, a promoter can be operably linked to nucleic acid encoding a polypeptide, whereby the promoter regulates or mediates the transcription of the nucleic acid.

[0206] As used herein, synthetic, with reference to, for example, a synthetic nucleic acid molecule or a synthetic gene or a synthetic peptide refers to a nucleic acid molecule or polypeptide molecule that is produced by recombinant methods and/or by chemical synthesis methods.

[0207] As used herein, the residues of naturally occurring α-amino acids are the residues of those 20 α-amino acids found in nature which are incorporated into protein by the specific recognition of the charged tRNA molecule with its cognate mRNA codon in humans. As used herein, an amino acid is an organic compound containing an amino group and a carboxylic acid group. A polypeptide contains two or more amino acids. For purposes herein, amino acids contained in the antibodies provided include the twenty naturally-occurring amino acids (see Table below), non-natural amino acids, and amino acid analogs (e.g., amino acids wherein the α-carbon has a side chain). As used herein, the amino acids, which occur in the various amino acid sequences of polypeptides appearing herein, are identified according to their well-known, three-letter or one-letter abbreviations (see Table below). The nucleotides, which occur in the various nucleic acid molecules and fragments, are designated with the standard single-letter designations used routinely in the art.

[0208] As used herein, amino acid residue refers to an amino acid formed upon chemical digestion (hydrolysis) of a polypeptide at its peptide linkages. The amino acid residues described herein are generally in the L isomeric form. Residues in the D isomeric form can be substituted for any L-amino acid residue, as long as the desired functional property is retained by the polypeptide. NH₂ refers to the free amino group present at the amino terminus of a polypeptide. COOH refers to the free carboxy group present at the carboxyl terminus of a polypeptide. In keeping with standard polypeptide nomenclature described in J. Biol. Chem., 243:3557-59 (1968) and adopted at 37 C.F.R. §§ 1.821-1.822, abbreviations for amino acid residues are shown in the following Table:

Table of Correspondence

SYMBOL

| 1-Letter | 3-Letter | AMINO ACID |
|---|---|---|
| Y | Tyr | Tyrosine |
| G | Gly | Glycine |
| F | Phe | Phenylalanine |
| M | Met | Methionine |
| A | Ala | Alanine |
| S | Ser | Serine |
| I | Ile | Isoleucine |
| L | Leu | Leucine |
| T | Thr | Threonine |
| V | Val | Valine |
| P | Pro | Proline |
| K | Lys | Lysine |
| H | His | Histidine |
| Q | Gln | Glutamine |
| E | Glu | Glutamic acid |
| Z | Glx | Glutamic Acid and/or Glutamine |
| W | Trp | Tryptophan |
| R | Arg | Arginine |
| D | Asp | Aspartic acid |
| N | Asn | Asparagine |
| B | Asx | Aspartic Acid and/or Asparagine |
| C | Cys | Cysteine |
| X | Xaa | Unknown or other |

[0209] All sequences of amino acid residues represented herein by a formula have a left to right orientation in the conventional direction of amino-terminus to carboxyl-terminus. The phrase amino acid residue is defined to include the amino acids listed in the above Table of Correspondence, modified, non-natural and unusual amino acids. A dash at the beginning or end of an amino acid residue sequence indicates a peptide bond to a further sequence of one or more amino acid residues or to an amino-terminal group such as NH₂ or to a carboxyl-terminal group such as COOH.

[0210] In a peptide or protein, suitable conservative substitutions of amino acids are known to those of skill in the art and generally can be made without altering a biological activity of a resulting molecule. Those of skill in the art recognize that, in general, single amino acid substitutions in non-essential regions of a polypeptide do not substantially alter biological activity (see, e.g., Watson et al., Molecular Biology of the Gene, 4th Edition, 1987, The Benjamin/Cummings Pub. Co., p. 224).

[0211] Such substitutions can be made in accordance with the exemplary substitutions set forth in the following Table:

Exemplary conservative amino acid substitutions

| Original residue | Exemplary Conservative substitution(s) |
|---|---|
| Ala (A) | Gly; Ser |
| Arg (R) | Lys |
| Asn (N) | Gln; His |
| Cys (C) | Ser |
| Gln (Q) | Asn |
| Glu (E) | Asp |
| Gly (G) | Ala; Pro |
| His (H) | Asn; Gln |
| Ile (I) | Leu; Val |
| Leu (L) | Ile; Val |
| Lys (K) | Arg; Gln; Glu |
| Met (M) | Leu; Tyr; Ile |
| Phe (F) | Met; Leu; Tyr |
| Ser (S) | Thr |
| Thr (T) | Ser |
| Trp (W) | Tyr |
| Tyr (Y) | Trp; Phe |
| Val (V) | Ile; Leu |

[0212] Other substitutions also are permissible and can be determined empirically or in accord with other known conservative or non-conservative substitutions.

[0213] As used herein, naturally occurring amino acids refer to the 20 L-amino acids that occur in polypeptides.

[0214] As used herein, the term non-natural amino acid refers to an organic compound that has a structure similar to a natural amino acid but has been modified structurally to mimic the structure and reactivity of a natural amino acid. Non-naturally occurring amino acids thus include, for example, amino acids or analogs of amino acids other than the 20 naturally occurring amino acids and include, but are not limited to, the D-stereoisomers of amino acids. Exemplary non-natural amino acids are known to those of skill in the art, and include, but are not limited to, 2-Aminoadipic acid (Aad), 3-Aminoadipic acid (bAad), β-alanine/β-Amino-propionic acid (Bala), 2-Aminobutyric acid (Abu), 4-Aminobutyric acid/piperidinic acid (4Abu), 6-Aminocaproic acid (Acp), 2-Aminoheptanoic acid (Ahe), 2-Aminoisobutyric acid (Aib), 3-Aminoisobutyric acid (Baib), 2-Aminopimelic acid (Apm), 2,4-Diaminobutyric acid (Dbu), Desmosine (Des), 2,2′-Diaminopimelic acid (Dpm), 2,3-Diaminopropionic acid (Dpr), N-Ethylglycine (EtGly), N-Ethylasparagine (EtAsn), Hydroxylysine (Hyl), allo-Hydroxylysine (Ahyl), 3-Hydroxyproline (3Hyp), 4-Hydroxyproline (4Hyp), Isodesmosine (Ide), allo-Isoleucine (Aile), N-Methylglycine, sarcosine (MeGly), N-Methylisoleucine (Melle), 6-N-Methyllysine (MeLys), N-Methylvaline (MeVal), Norvaline (Nva), Norleucine (Nle), and Ornithine (Orn).

[0215] As used herein, polypeptide, peptide, and protein refer to polymers of amino acids of any length. Where not used interchangeably other characteristics, such as size, and structure, are contemplated, as defined below. The polymer can be linear or branched, and can contain amino acids, including modified amino acids, and it can be interrupted by non-amino acids. Also included are amino acid polymers that include sequence modifications including, replacements, insertions, deletions, and transpositions. Also included are amino acid polymers that contain post-translational modifications, such as disulfide bonds, glycosylation, sialylation, conjugation to other proteins, peptides, and polypeptides, such, but not limited to, conjugation to a detectable marker, or reporter.

[0216] As used herein the term “amino acid” includes natural and/or unnatural or synthetic amino acids, including glycine and the D or L optical isomers, and amino acid analogs and peptidomimetics.

[0217] As used herein, a peptide contains at least 2 amino acids, and generally fewer than 100 amino acids. A small peptide is a peptide that contains fewer than 10 amino acids, typically 2 to 6 amino acids.

[0218] As used herein, a polypeptide is an amino acid chain that contains a plurality of peptides, and is generally 100 amino acids or longer.

[0219] As used herein, a protein is a polypeptide that has a three-dimensional structure and can include bonds in addition to peptide bonds, such as disulfide bonds and other interactions, that participate in forming the two- and three-dimensional structure.

[0220] As used herein, cell culture medium that contains MEVs refers to medium harvested from a cell culture that produce MEVs from which the MEVs can be purified. Culture medium is as isolated from the cell culture with cells, cellular, and other debris removed.

[0221] As used herein, gene editing technology includes clustered regularly interspaced short palindromic repeats (CRISPR)-CRISPR-associated protein 9 (Cas9), and also other technologies that are used to edit genomes. These include, for example: transcription activator-like effector nucleases (TALENs), zinc-finger nucleases (ZFNs), and homing endonucleases or meganucleases, and other “CRISPR-like” and CRISPR-associated systems, such as the systems developed by Metagenomi.

[0222] As used herein, a DNA construct is a single- or double-stranded, linear or circular DNA molecule that contains segments of DNA combined and juxtaposed in a manner not found in nature. DNA constructs exist as a result of human manipulation, and include clones and other copies of manipulated molecules.

[0223] As used herein, a DNA segment is a portion of a larger DNA molecule having specified attributes. For example, a DNA segment encoding a specified polypeptide is a portion of a longer DNA molecule, such as a plasmid or plasmid fragment, which, when read from the 5′ to 3′ direction, encodes the sequence of amino acids of the specified polypeptide.

[0224] As used herein, the term polynucleotide means a single- or double-stranded polymer of deoxyribonucleotides or ribonucleotide bases read from the 5′ to the 3′ end. Polynucleotides include RNA and DNA, and can be isolated from natural sources, synthesized in vitro, or prepared from a combination of natural and synthetic molecules. The length of a polynucleotide molecule is given herein in terms of nucleotides (abbreviated nt) or base pairs (abbreviated bp). The term nucleotides is used for single- and double-stranded molecules where the context permits. When the term is applied to double-stranded molecules it is used to denote overall length and will be understood to be equivalent to the term base pairs. It will be recognized by those skilled in the art that the two strands of a double-stranded polynucleotide can differ slightly in length and that the ends thereof can be staggered; thus all nucleotides within a double-stranded polynucleotide molecule cannot be paired. Such unpaired ends will, in general, not exceed 20 nucleotides in length.

[0225] As used herein, production by recombinant methods refers to the use of the well-known methods of molecular biology for expressing proteins encoded by cloned DNA

[0226] As used herein, heterologous nucleic acid is nucleic acid that encodes products (i.e., RNA and/or proteins) that are not normally produced in vivo by the cell in which it is expressed, or nucleic acid that is in a locus in which it does not normally occur, or that mediates or encodes mediators that alter expression of endogenous nucleic acid, such as DNA, by affecting transcription, translation, or other regulatable biochemical processes. Heterologous nucleic acid, such as DNA, also is referred to as foreign nucleic acid. Any nucleic acid, such as DNA, that one of skill in the art would recognize or consider as heterologous or foreign to the cell in which it is expressed, is herein encompassed by heterologous nucleic acid; heterologous nucleic acid includes endogenously added nucleic acid that is also expressed endogenously. Heterologous nucleic acid is generally not endogenous to the cell into which it is introduced, but has been obtained from another cell or prepared synthetically or is introduced into a genomic locus in which it does not occur naturally, or its expression is under the control of regulatory sequences or a sequence that differs from the natural regulatory sequence or sequences.

[0227] As used herein, MEV therapy involves the administration of an MEV, such as the endo-loaded MEVs provided herein, to a subject to treat a disease, disorder, or condition. The MEVs are loaded with a heterologous cargo, so that they deliver or express products when introduced to a subject.

[0228] As used herein, expression refers to the process by which polypeptides are produced by transcription and translation of polynucleotides. The level of expression of a polypeptide can be assessed using any method known in art, including, for example, methods of determining the amount of the polypeptide produced from the host cell. Such methods can include, but are not limited to, quantification of the polypeptide in the cell lysate by ELISA, Coomassie blue staining following gel electrophoresis, Lowry protein assay and Bradford protein assay.

[0229] As used herein, a host cell is a cell that is used to receive, maintain, reproduce and/or amplify a vector. A host cell also can be used to express the polypeptide encoded by the vector. The nucleic acid contained in the vector is replicated when the host cell divides, thereby amplifying the nucleic acids.

[0230] As used herein, a vector is a replicable nucleic acid from which one or more heterologous proteins can be expressed when the vector is transformed into an appropriate host cell. Reference to a vector includes those vectors into which a nucleic acid encoding a polypeptide or fragment thereof can be introduced, typically by restriction digest and ligation. Reference to a vector also includes those vectors that contain nucleic acid encoding a polypeptide or RNA. The vector is used to introduce the nucleic acid encoding the polypeptide into the host cell for amplification of the nucleic acid or for expression/display of the polypeptide encoded by the nucleic acid. The vectors can remain episomal, but can be designed to effect integration of a gene or portion thereof into a chromosome of the genome. A vector also includes virus vectors or viral vectors, and bacterial vectors.

[0231] As used herein, an expression vector includes vectors capable of expressing DNA that is operatively linked with regulatory sequences, such as promoter regions, that are capable of affecting expression of such DNA fragments. Such additional segments can include promoter and terminator sequences, and optionally can include one or more origins of replication, one or more selectable markers, an enhancer, a polyadenylation signal, and the like. Expression vectors are generally derived from plasmid or viral DNA, or can contain elements of both. Thus, an expression vector refers to a recombinant DNA or RNA construct, such as a plasmid, a phage, recombinant virus or other vector that, upon introduction into an appropriate host cell, results in expression of the cloned DNA. Appropriate expression vectors are well-known to those of skill in the art and include those that are replicable in eukaryotic cells and/or prokaryotic cells and those that remain episomal or those which integrate into the host cell genome.

[0232] As used herein, primary sequence refers to the sequence of amino acid residues in a polypeptide or the sequence of nucleotides in a nucleic acid molecule.

[0233] As used herein, sequence identity refers to the number of identical or similar amino acids or nucleotide bases in a comparison between a test and a reference polypeptide or polynucleotide. Sequence identity can be determined by sequence alignment of nucleic acid or protein sequences to identify regions of similarity or identity. For purposes herein, sequence identity is generally determined by alignment to identify identical residues. The alignment can be local or global. Matches, mismatches and gaps can be identified between compared sequences. Gaps are null amino acids or nucleotides inserted between the residues of aligned sequences so that identical or similar characters are aligned. Generally, there can be internal and terminal gaps. When using gap penalties, sequence identity can be determined with no penalty for end gaps (e.g., terminal gaps are not penalized). Alternatively, sequence identity can be determined without taking into account gaps as the number of identical positions/length of the total aligned sequence×100.

[0234] As used herein, a global alignment is an alignment that aligns two sequences from beginning to end, aligning each letter in each sequence only once. An alignment is produced, regardless of whether or not there is similarity or identity between the sequences. For example, 50% sequence identity based on global alignment means that in an alignment of the full sequence of two compared sequences each of 100 nucleotides in length, 50% of the residues are the same. It is understood that global alignment also can be used in determining sequence identity even when the length of the aligned sequences is not the same. The differences in the terminal ends of the sequences will be taken into account in determining sequence identity, unless the no penalty for end gaps is selected. Generally, a global alignment is used on sequences that share significant similarity over most of their length. Exemplary algorithms for performing global alignment include the Needleman-Wunsch algorithm (Needleman et al. (1970) J. Mol. Biol. 48:443). Exemplary programs for performing global alignment are publicly available and include the Global Sequence Alignment Tool available at the National Center for Biotechnology Information (NCBI) website (ncbi.nlm.nih.gov/), and the program available at deepc2.psi.iastate.edu/aat/align/align.html.

[0235] As used herein, a local alignment is an alignment that aligns two sequences, but only aligns those portions of the sequences that share similarity or identity. Hence, a local alignment determines if sub-segments of one sequence are present in another sequence. If there is no similarity, no alignment will be returned. Local alignment algorithms include BLAST or Smith-Waterman algorithm (Adv. Appl. Math. 2:482 (1981)). For example, 50% sequence identity based on local alignment means that in an alignment of the full sequence of two compared sequences of any length, a region of similarity or identity of 100 nucleotides in length has 50% of the residues that are the same in the region of similarity or identity.

[0236] For purposes herein, sequence identity can be determined by standard alignment algorithm programs used with default gap penalties established by each supplier. Default parameters for the GAP program can include: (1) a unary comparison matrix (containing a value of 1 for identities and 0 for non-identities) and the weighted comparison matrix of Gribskov et al. (1986) Nucl. Acids Res. 14:6745, as described by Schwartz and Dayhoff, eds., Atlas of Protein Sequence and Structure, National Biomedical Research Foundation, pp. 353-358 (1979); (2) a penalty of 3.0 for each gap and an additional 0.10 penalty for each symbol in each gap; and (3) no penalty for end gaps. Whether any two nucleic acid molecules have nucleotide sequences or any two polypeptides have amino acid sequences that are at least 80%, 85%, 90%, 95%, 96%, 97%, 98% or 99% identical, or other similar variations reciting a percent identity, can be determined using known computer algorithms based on local or global alignment (see e.g., wikipedia.org/wiki/Sequence_alignment_software, providing links to dozens of known and publicly available alignment databases and programs). Generally, for purposes herein sequence identity is determined using computer algorithms based on global alignment, such as the Needleman-Wunsch Global Sequence Alignment tool available from NCBI/BLAST (blast.ncbi.nlm.nih.gov/Blast.cgi?CMD=Web&Page_TYPE=BlastHome); LAlign (William Pearson implementing the Huang and Miller algorithm (Adv. Appl. Math. (1991) 12:337-357)); and program from Xiaoqui Huang available at deepc2.psi.iastate.edu/aat/align/align.html. Typically, the full-length sequence of each of the compared polypeptides or nucleotides is aligned across the full-length of each sequence in a global alignment. Local alignment also can be used when the sequences being compared are substantially the same length.

[0237] Therefore, as used herein, the term identity represents a comparison or alignment between a test and a reference polypeptide or polynucleotide. In one non-limiting example, at least 90% identical to refers to percent identities from 90 to 100% relative to the reference polypeptide or polynucleotide. Identity at a level of 90% or more is indicative of the fact that, assuming for exemplification purposes a test and reference polypeptide or polynucleotide length of 100 amino acids or nucleotides are compared, no more than 10% (i.e., 10 out of 100) of amino acids or nucleotides in the test polypeptide or polynucleotide differ from those of the reference polypeptide. Similar comparisons can be made between a test and reference polynucleotides. Such differences can be represented as point mutations randomly distributed over the entire length of an amino acid sequence or they can be clustered in one or more locations of varying length up to the maximum allowable, e.g., 10/100 amino acid difference (approximately 90% identity). Differences also can be due to deletions or truncations of amino acid residues. Differences are defined as nucleic acid or amino acid substitutions, insertions or deletions. Depending on the length of the compared sequences, at the level of homologies or identities above about 85-90%, the result can be independent of the program and gap parameters set; such high levels of identity can be assessed readily, often without relying on software.

[0238] As used herein, a therapeutic effect means an effect resulting from treatment of a subject that alters, typically improves or ameliorates, the symptoms of a disease or condition or that cures a disease or condition.

[0239] As used herein, a therapeutically effective amount or a therapeutically effective dose refers to the quantity of an agent, compound, material, or composition containing a compound that is at least sufficient to produce a therapeutic effect following administration to a subject. Hence, it is the quantity necessary for preventing, curing, ameliorating, arresting or partially arresting a symptom of a disease or disorder.

[0240] As used herein, therapeutic efficacy refers to the ability of an agent, compound, material, or composition containing a compound to produce a therapeutic effect in a subject to whom the agent, compound, material, or composition containing a compound has been administered.

[0241] As used herein, a prophylactically effective amount or a prophylactically effective dose refers to the quantity of an agent, compound, material, or composition containing a compound that when administered to a subject, will have the intended prophylactic effect, e.g., preventing or delaying the onset, or reoccurrence, of disease or symptoms, reducing the likelihood of the onset, or reoccurrence, of disease or symptoms, or reducing the incidence of viral infection. The full prophylactic effect does not necessarily occur by administration of one dose, and can occur only after administration of a series of doses. Thus, a prophylactically effective amount can be administered in one or more administrations.

[0242] As used herein, amelioration of the symptoms of a particular disease or disorder by a treatment, such as by administration of a pharmaceutical composition or other therapeutic, refers to any lessening, whether permanent or temporary, lasting or transient, of the symptoms that can be attributed to or associated with administration of the composition or therapeutic.

[0243] As used herein, an anti-cancer agent refers to any agent that is destructive or toxic to malignant cells and tissues. For example, anti-cancer agents include agents that kill cancer cells or otherwise inhibit or impair the growth of tumors or cancer cells.

[0244] As used herein therapeutic activity refers to the in vivo activity of a therapeutic polypeptide. Generally, the therapeutic activity is the activity that is associated with treatment of a disease or condition.

[0245] As used herein, the term subject refers to an animal, including a mammal, such as a human being.

[0246] As used herein, a patient refers to a human subject.

[0247] As used herein, animal includes any animal, such as, but not limited to, primates including humans, gorillas and monkeys; rodents, such as mice and rats; fowl, such as chickens; ruminants, such as goats, cows, deer, and sheep; and pigs and other animals. Non-human animals exclude humans as the contemplated animal.

[0248] As used herein, a composition refers to any mixture. It can be a solution, suspension, liquid, powder, paste, aqueous, non-aqueous, or any combination thereof.

[0249] As used herein, a drug delivery system is a composition or combination of associated compositions or devices or other components for delivery of a bioactive molecule or other cargo packaged in an MEV, such as the endogenously-loaded MEVs provided herein. The delivery system comprises an MEV or MEVs, such as the MEVs that contain endogenous cargo as detailed herein. The delivery systems contain the MEVs in compositions, particularly those formulated for a particular route of administration. Different tissues and organs can be targeted by virtue of the route of administration. The delivery system can include additional components, such as a bioactive agent for combination therapy, or a delivery device. For example, a drug delivery system comprises MEVs produced as described herein. The MEVs can be formulated for a particular route of administration, and the system optionally can include a device for administration of the MEVs.

[0250] As used herein, a combination refers to any association between or among two or more items. The combination can be two or more separate items, such as two compositions or two collections, a mixture thereof, such as a single mixture of the two or more items, or any variation thereof. The elements of a combination are generally functionally associated or related.

[0251] As used herein, combination therapy refers to administration of two or more different therapeutics. The different therapeutic agents can be provided and administered separately, sequentially, intermittently, or can be provided in a single composition.

[0252] As used herein, a kit is a packaged combination that optionally includes other elements, such as additional reagents and instructions for use of the combination or elements thereof, for a purpose including, but not limited to, activation, administration, diagnosis, and assessment of a biological activity or property.

[0253] As used herein, a unit dose form refers to physically discrete units suitable for human and animal subjects and packaged individually as is known in the art.

[0254] As used herein, a single dosage formulation refers to a formulation for direct administration.

[0255] As used herein, a multi-dose formulation refers to a formulation that contains multiple doses of a therapeutic agent and that can be directly administered to provide several single doses of the therapeutic agent. The doses can be administered over the course of minutes, hours, weeks, days or months. Multi-dose formulations can allow dose adjustment, dose-pooling and/or dose-splitting. Because multi-dose formulations are used over time, they generally contain one or more preservatives to prevent microbial growth.

[0256] As used herein, an article of manufacture is a product that is made and sold. As used throughout this application, the term is intended to encompass any of the compositions provided herein contained in articles of packaging.

[0257] As used herein, a fluid refers to any composition that can flow. Fluids thus encompass compositions that are in the form of semi-solids, pastes, solutions, aqueous mixtures, gels, lotions, creams and other such compositions.

[0258] As used herein, an isolated or purified polypeptide or protein (e.g., an isolated antibody or antigen-binding fragment thereof) or biologically-active portion thereof (e.g., an isolated antigen-binding fragment) is substantially free of cellular material or other contaminating proteins from the cell or tissue from which the protein is derived, or substantially free from chemical precursors or other chemicals when chemically synthesized. Preparations can be determined to be substantially free if they appear free of readily detectable impurities as determined by standard methods of analysis, such as thin layer chromatography (TLC), gel electrophoresis and high performance liquid chromatography (HPLC), used by those of skill in the art to assess such purity, or sufficiently pure such that further purification does not detectably alter the physical and chemical properties, such as enzymatic and biological activities, of the substance. Methods for purification of the compounds to produce substantially chemically pure compounds are known to those of skill in the art. A substantially chemically pure compound, however, can be a mixture of stereoisomers. In such instances, further purification might increase the specific activity of the compound. As used herein, a cellular extract or lysate refers to a preparation or fraction which is made from a lysed or disrupted cell.

[0259] As used herein, a control refers to a sample that is substantially identical to the test sample, except that it is not treated with a test parameter, or, if it is a plasma sample, it can be from a normal volunteer not affected with the condition of interest. A control also can be an internal control.

[0260] As used herein, the singular forms a, an and the include plural referents unless the context clearly dictates otherwise. Thus, for example, reference to a polypeptide, comprising an immunoglobulin domain includes polypeptides with one or a plurality of immunoglobulin domains.

[0261] As used herein, the term or is used to mean and/or unless explicitly indicated to refer to alternatives only or the alternatives are mutually exclusive.

[0262] As used herein, ranges and amounts can be expressed as about a particular value or range. About also includes the exact amount. Hence about 5 amino acids means about 5 amino acids and also 5 amino acids.

[0263] As used herein, optional or optionally means that the subsequently described event or circumstance does or does not occur and that the description includes instances where said event or circumstance occurs and instances where it does not. For example, an optionally variant portion means that the portion is variant or non-variant.

[0264] As used herein, the abbreviations for any protective groups, amino acids and other compounds, are, unless indicated otherwise, in accord with their common usage, recognized abbreviations, or the IUPAC-IUB Commission on Biochemical Nomenclature (see, Biochem. (1972) 11 (9): 1726-1732).

[0265] For clarity of disclosure, and not by way of limitation, the detailed description is divided into the subsections that follow.

### B. Microalgae and Overview

### Microalgae

[0266] Algae are a complex, polyphyletic collection of predominantly photosynthetic organisms. These organisms include micro- and macroscopic forms. Macroalgae (seaweed) are multicellular, large-size algae, visible with the naked eye. Microalgae are microscopic single cells and include prokaryotes (e.g., cyanobacteria), and eukaryotes, such as green algae.

[0267] Compared to photosynthetic crops, microalgae have a higher growth rate and can be cultivated on non-arable land, and also in bioreactors. Many species of microalgae can be grown year-round in industrial scale photobioreactors under controlled cultivation conditions (Adamo et al. (2021) Journal of Extracellular Vesicles 10: e12081).

[0268] Algae generally are classified into eleven major phyla: Cyanophyta, Chlorophyta, Rhodophyta, Glaucophyta, Euglenophyta, Chlorarachniophyta, Charophyta, Cryptophyta, Haptophyta, Heterokontophyta, and Dinophyta (Barkia et al. (2019) Mar. Drugs 17 (5): 304). Different pigments occur in each algae group. Cyanobacteria (or Cyanophyta) contain chlorophyll-a,-d, and -f, in addition to the phycobiliproteins (proteins that capture light energy), phycocyanin, allophycocyanin, and phycoerythrin. Glaucophytes contain chlorophyll-a and harvest light via phycobiliproteins. Chlorophytes have chlorophyll-a and -b, as well as carotenoids, including β-carotene and various xanthophylls (e.g., astaxanthin, canthaxanthin, lutein, and zeaxanthin). The primary pigments of Rhodophyta (red algae) are phycoerythrin and phycocyanin, which can mask chlorophyll-a; red algae also produce a broad spectrum of carotenes and xanthophyll light-harvesting pigments (Barkia et al. (2019) Mar. Drugs 17 (5): 304).

[0269] Provided herein are extracellular vesicles produced by microalgae, particularly unicellular green algae, such as species of Chlorella, for use for delivery of endogenously loaded heterologous cargo to animals, including humans. The microalgae (Chlorella) are unicellular eukaryotes that typically are haploid but can have a diploid stage of the life cycle. The microalgae can be cultured in bioreactors and the extracellular vesicles isolated therefrom. The resulting extracellular vesicles can be endogenously loaded inside the genetically engineered producing cell by the microalgae itself with a heterologous cargo produced by the engineered producer cell, generally a cargo of bioactive molecules to produce compositions that contain the extracellular vesicles for administration to animals, including human. The compositions can be formulated for any desired route of administration, including topical, local, systemic, parenteral, intranasal, inhalation, by any type of nebulizer and oral. These routes include oral, intravenous, subcutaneous, inhalation, mucosal, rectal, vaginal, intranasal and other suitable routes. The heterologous cargo includes biomolecules, such as DNA, RNA, proteins, protein complexes, and protein-nucleic acid complexes. The extracellular vesicles can be formulated as liquids, powders, including lyophilized powders, tablets, capsules, emulsions, particles, sprays, gels, ointments, creams, and other formulations. They can be used for therapeutic, diagnostic, theragnostic, cosmetic, and other uses. The extracellular vesicles can be used to treat diseases and conditions, that include cancers, inflammatory diseases and conditions in which the immune system plays a role in the etiology or symptoms, nervous system disorders, and pathogen infections, including viral and bacterial and other pathogens. They can be used to treat dermatological diseases and conditions, lung diseases and conditions, and gastric diseases and conditions. The extracellular vesicles can be targeted to specific organs or tissues or can be locally administered.

### Microalgae and Microalgae Extracellular Vesicles (MEVs)

[0270] The following discussion provides an overview of the disclosure herein. Provided herein are MEVs, and genetically-modified microalgae cells that produce the MEVs, including heterologous cargo-loaded MEVs, cargo that can be loaded into the MEVs, routes of administration of MEVs, in vivo distribution of MEVs upon administration to animals.

[0271] As described and shown herein, MEVs have a number of advantages over the use of existing drug delivery systems, such as, exosomes derived from mesenchymal stem cells, gold nanoparticles, liposomes and other plant and animal-derived EVs. Mesenchymal stem cells are a commonly used source of exosomes, and exosomes derived from mesenchymal stem cells are used in drug delivery, for example as anti-cancer vaccines, because they have enhanced passive targeting (a method of preparing a drug carrier system so that it remains circulating in the blood stream), as a result of their small size, indigenous nature, and ability to cross biological barriers. Mesenchymal stem cells, however, have limited secretion of exosomes, and scaling up production of exosomes is difficult due to the need to optimize purification, increase the homogeneity of exosomes, and establish efficient transfection strategies. Nanoparticles can lead to toxicity and techniques for synthesizing nanoparticles are limited in their ability to scale for manufacturing purposes. Nanoparticle and liposome-based drug delivery methods also can lead to the formation of a teratoma (a tumor comprised of several different types of tissue). Liposome-based drug delivery methods have been shown to be less efficient for internalization into a specific cell, tissue or organ, compared to exosomes. Plant-derived EVs, such as those from curcumin, ginger, grapefruit, and lemon, have been used for drug delivery, but their extraction process and use in treatment has not been optimized nor exploited. The production of EVs from agricultural products, such as fruits and milk, is economically impractical since such products require 3-4 months to grow.

[0272] Algae cells can be grown anywhere and within a few days. Algal EVs avoid phagocytosis or degradation by macrophages and circulate for prolonged times in vivo, and have low immunogenicity. Algal EVs also have a lower risk of teratoma formation. Algae, thus, provide a source from which pure, well-characterized EVs of high quality can be obtained (Kuruvinashetti et al. (2020) 20th International Conference on Nanotechnology 354-357). Kuruvinashetti et al. does not describe the use of Chlorella species as a source of EVs, nor its advantages as a source. Prior art does not describe the biodistribution of MEVs per se, nor the implications thereof for administration of MEVs with drugs directed to particular organs, tissues, or systems.

[0273] A focus herein are MEVs that are endogenously loaded (endo-loaded; loaded by the microalgae), and the genetically-modified microalgae producer cells that express the heterologous cargo and endo-load it into the MEVs before the MEVs are secreted into the culture medium. The MEVs and compositions containing them can serve as drug delivery systems.

[0274] Extracellular vesicles (EV) mediate interaction between cells, mediate non-classical protein secretion, facilitating processes such as antigen presentation, in trans signaling to neighboring cells and transfer of RNAs, proteins and metabolites. These vesicles are secreted by different cell types/tissues and harbor a common set of molecules that are essential for their structure and trafficking apart from distinct subsets of proteins/RNA, reflecting the biological function of the producer cell (Mathivanan et al. (2009) Proteomics 9:4997-5000, doi.org/10.1002/pmic.200900351). MEVs are naturally internalized by human cells cultured in vitro as well as by bacteria (see, International PCT Publication No: WO2022/053687, and in vivo, by mouse cells, as a mammalian model, as shown and described herein.

[0275] Native MEVs contain proteins, lipids, including fatty acids and glycerolipids, carbohydrates, including sugars, oligosaccharides, and polysaccharides, and nucleotides. They have a membrane that forms a particle that has a diameter of 50-250 nm. MEVs do not have a cell wall. The lumen of the MEVs contain macromolecules that originate with the producer microalgae cell. These macromolecules include, for example, mRNAs, sRNAs, peptides and proteins, including surface proteins and glycoproteins can be surface markers. The contents of the MEV lumen are protected from degradation by proteases and RNases.

[0276] Extracellular vesicles from microalgae (MEVs) also mediate interactions between cells and among cells, facilitating processes such as trans-signaling to neighboring cells and transfer of bioactive molecules, such as siRNA. These vesicles are secreted by the microalgae cell and harbor a common set of molecules that are essential for their structure and trafficking. The microalgae cells can be genetically modified to encode heterologous siRNA to provide producer cells that express the siRNA and package the siRNA in MEVs (see, International PCT Publication No.: WO 2022/053687). This finding is extended herein to provide genetically-modified producer microalgae cells that generate endo-loaded MEVs that contain other heterologous bioactive molecules, such as peptides and proteins, mRNA, other types of RNAi, including siRNA to different targets, shRNA, saRNA, and products produced by the genetically-modified microalgae producer cells.

[0277] MEVs are generated by a producer cell of a microalgae species, such as Chlorella vulgaris. They can be generated in a suspension cell culture system in volumes up to at least 170 liters. The MEVs can be generated in a semi-continuous culture system in volumes up to at least 600 liters. They are isolated by methods including steps of centrifugation, filtration (such as 1.2 μm) and membrane concentration (such as with a molecular weight cut-off of Da) and can be further purified. For example, they can be further purified in a multiple-step process that includes tangential flow filtration (TFF), diafiltration, size exclusion chromatography (SEC), and ultracentrifugation. They can be stored at −50° C./−80° C. (for at least 2 years), at +4° C. for at least 1-2 weeks, until use. MEVs can be subjected to at least 3 cycles of freezing/thawing without losing their integrity. MEVs can be heated up to 60° C. without losing their integrity.

[0278] MEVs can be modified by introducing heterologous cargo either exogenously (by man, after isolation and purification of the MEV), and/or endogenously (by producer cells genetically modified to express and load the heterologous cargo, prior to the secretion of the MEVs). MEVs thereby can comprise heterologous cargo, such as a polypeptide, a nucleic acid (such as DNA or RNA) or other polynucleotide, large biologicals, or small molecules. The cargo can be introduced before (endo-loading) of after (exo-loading) separation of MEVs from the producer cell or by endo-loading and then exo-loading to add second heterologous cargo, such as for combination therapy. EVs can be isolated from the producer cell and then modified, thereby generating exo-loaded MEVs. The microalgae cell can be genetically modified with a nucleic acid (genetic coding regions for siRNA, mRNA; miRNA, proteins, polypeptides, SORF (small open reading frames), lncRNAs (long non-coding RNA) to generate a producer cell line; producer of MEVs with modified composition and/or behavior.

[0279] As described herein, the cells can be modified to express heterologous proteins or produce heterologous mRNA product, or to produce other biomolecules, such as by introduction of nucleic acid encoding a biosynthetic pathway. Appropriate selection of regulatory sequences can result in producer cells that produce a lot of a particular product that is packaged in MEVs.

[0280] The producer cells also can be genetically modified, for example, to facilitate or increase production of MEVs or result in MEVs with particular structure. For example, microalgae producer cells can be genome modified to have modified cellular or membrane content, such as changed cytoplasm content and/or changed content of the cell membrane. In another example, a producer microalgae cell can contain a nucleic acid that can be transcribed (e.g., mRNA), and when mRNA is made, it can be translated into a polypeptide, by either the MEV producer cell or by the cells targeted by the MEVs. The producer cell can also be modified to generate non-translatable RNA (e.g., siRNA, miRNA or long non-coding RNA), with regulatory roles, and also to produce mRNA that is not translated or not translated to a large extent by the microalgae cell, but is translated by a mammalian, such as human cell. This can be effected by modifying portions of the mRNA responsible for interaction with ribosomes, and/or for interaction with aminoacyl-tRNAs complexes and/or other activities related to translation. MEVs derived from the producer cell can carry the non-translatable RNA, the transcribed RNA, or the translated polypeptide as a cargo. MEVs generated from the modified producer cell comprise the modifications of the producer cell, which can include a heterologous cargo. Those MEVs are endo-loaded with the heterologous cargo. MEVs can also be endo-loaded and exo-loaded with different molecular cargo(s).

[0281] EVs, including MEVs can interact with the target cell and deliver a cargo (e.g., a therapeutic agent or other) to a target cell. The target cell can be a cell from any organism, including an animal, such as a mammal, including a human, a plant, a bacterium, or a fungus. The heterologous cargo, which is a bioactive agent, such as a therapeutic agent, acts on the target cell that is contacted with the cargo-loaded MEV. Contacting can occur in vitro or in vivo in a subject. It is shown herein that MEVs can be internalized and distributed to various tissues and organs; biodistribution depends upon the route of administration. As shown and described herein, MEVs can be detectably labelled to track and visualize them inside cells, tissues and organisms. Labeling agents, include, but are not limited to, fluorescent membrane markers, such as PKH26, PKH 67, DiR, and others.

[0282] As described and shown herein, MEVs can be internalized by cells of the human respiratory system in vitro in a dose-dependent manner. As shown herein, MEVs can be internalized by cells, in tissues and organs in animal models. As shown herein, the MEVs have distribution patterns that differ from animal EVs. For example, MEV absorption in vitro by human alveolar epithelial cells is in the order of 90% of the cells at 4 hours post-treatment, with a maximum at 24 hours. Exposure of human alveolar epithelial cells to MEVs is not toxic at a MEV-to-cell ratio up to 10,000,000. MEVs can be administered in vivo to a mouse model, at doses of up to 4×10¹⁰ MEVs per animal, with no signs of toxicity.

[0283] As shown herein, the MEVs target specific organs upon administration by several routes, as shown in a rodent model in the Examples. The routes include intravenous, intranasal, inhalation (intratracheal) and oral (per os). It is shown herein that specific organs targeted by MEVs depend on the route of administration and include the lungs, the spleen, the liver, the brain, the intestine, and the GALT (gut-associated lymphoid tissue). Upon intranasal administration, MEVs are transported from the olfactory bulb to different regions of the brain in vivo. Upon oral administration, MEVs are transported to the gut-associated lymphoid tissue (GALT), and internalized by GALT cells in vivo. Upon oral administration, as shown here, MEVs are transported from the intestine to the spleen in vivo. Upon intravenous administration, MEVs are transported to the liver and to the spleen, in vivo. Upon intratracheal administration, MEVs are transported to the lungs, in vivo.

### C. Extracellular Vesicles

[0284] Extracellular vesicles (EVs), in general, are biomolecular structures released from plant and animal cells that play a role in cell-to-cell communication.

[0285] Structurally, EVs are negatively charged lipid bilayer vesicles with a density of 1.13 to 1.19 g/mL. EVs are able to cross barriers such as the plasma (or cytoplasmic) membrane and the blood/brain barrier, and enable the horizontal transfer of their functional contents (i.e., proteins, lipids, RNA molecules, and circulating DNA) from a donor to a recipient cell (Kuruvinashetti et al. (2020) 20th International Conference on Nanotechnology 354-357). EVs also are naturally stable in various biological fluids, immunologically inert, and can exhibit organ-specific targeting abilities (Picciotto et al. (2021) Biomater. Sci. doi: 10.1039/d0bm01696a).

[0286] EVs contain endogenous lipids, nucleic acids, and proteins. Although results differ due to variations in isolation techniques and methods of analyzing the data, EVs generally contain proteins associated with the plasma membrane, cytosol and those involved in lipid metabolism (see, e.g., Doyle and Wang (2019) Cells 8 (7): 727). Proteins involved in the biogenesis of EVs (e.g., components of the ESCRTs), EV formation and release (e.g., RAB27A, RAB11B, and ARF6), signal transduction, and antigen presentation, as well as tetraspanins, commonly occur in EVs (Abels et al. (2016) Mol. Neurobiol. 36 (3): 301-312). EVs are enriched for cholesterol, sphingomyelin, glycosphingolipids, and phosphatidylserine (Kuruvinashetti et al. (2020) 20th International Conference on Nanotechnology 354-357).

[0287] Although a small number of studies have identified genomic and mitochondrial DNA in EVs, EVs are primarily enriched with endogenous small RNAs. Studies have identified mRNAs, miRNAs, rRNAs, long and short non-coding RNA, RNA fragments, piwi-interacting RNA, vault RNA, and Y RNA in EVs. Most of the RNA that naturally occurs in EVs is ˜200 nucleotides long (with a small portion up to 4 kb) and thus it is fragmented, although circular RNAs also have been shown to be enriched and stable in EVs. RNA in EVs is protected from RNase digestion in the extracellular environment by the lipid bilayer (Abels et al. (2016) Mol. Neurobiol. 36 (3): 301-312). The Exocarta, Vesiclepedia, and EVpedia databases are publicly available and provide data on the protein, nucleic acid, and lipid content of EVs (generally EVs from mammalian, such as human origin), as well as the isolation and purification procedures used, from EV studies (Abels et al. (2016) Mol. Neurobiol. 36 (3): 301-312).

[0288] In mammals, EVs are used by cells to mediate several physiological processes or affect various pathological conditions associated with the activation of an immune response or the spread of disease or infection. EVs, in general, also can mediate cross-species communication and they occur in all kingdoms of life. Sources of EVs include mammalian cells, bacteria, bovine milk and plants (Adamo et al. (2021) J. Extracell. Vesicles 10: e12081). Although plants and algae possess a cell wall outside their plasma membrane, which could be a physical barrier for the release of EVs, plants and algae release EVs (Picciotto et al. (2021) Biomater. Sci. doi: 10.1039/d0bm01696a; see also Khamsi (2020) Nature 582 (7812): S19-S19, DOI: 10.1038/d41586-020-01771-1; and International PCT Publication No. WO2022/053687, discussed above).

### 1. Types of Extracellular Vesicles (EVs)

### a. Exosomes

[0289] There are three primary subtypes of EVs; they are classified based on their biogenesis, mode of release, size, content, and function: microvesicles (MVs), exosomes, and apoptotic bodies (Doyle and Wang (2019) Cells 8 (7): 727). Exosomes, or intraluminal vesicles (ILVs), are 30-150 nm in diameter and are released through multivesicular bodies (MVBs) in the endosomal pathway. In the endosomal pathway, early endosomes form by inward budding of the plasma membrane and can transform into late endosomes, which accumulate ILVs by inward budding of the endosomal membrane. Late endosomes which contain a number of small vesicles are called MVBs. MVBs either fuse with the lysosome and are degraded, or the plasma membrane which releases the IL Vs as exosomes into the extracellular space. The endosomal sorting complexes required for transport (ESCRT) pathway regulates MVB transportation and exosome formation and is reported to be the primary driver of exosome biogenesis, although other mechanisms of exosome biogenesis exist, including those mediated by the sphingolipid ceramide, which can facilitate membrane invagination, or proteins in the tetraspanin family. The ESCRT accessory proteins Alix, TSG101, HSC70 and HSP90β have been referred to as exosomal marker proteins (Doyle et al. (2019) Cells 8 (7): 727).

[0290] Exosomes are released into the extracellular space by the fusion of the MVB limiting membrane with the plasma membrane. A number of proteins are involved in the release of exosomes, including Rab GTPases, diacylglycerol kinase a, and SNARE proteins (Abels et al. (2016) Cell Mol. Neurobiol. 36 (3): 301-312).

[0291] Exosomes are candidates for drug delivery systems: they have a long circulating half-life; exosomes are tolerated by the human body and can penetrate cell membranes and target specific cell types; and they can be loaded with genetic material, a protein, or a small molecule (Doyle and Wang (2019) Cells 8 (7): 727).

### b. Microvesicles

[0292] Microvesicles (MVs, or ectosomes) form by outward budding, or pinching, of the cell's plasma membrane, and have a diameter of 100 nm to 1 μm. The formation of MVs involves cytoskeleton components, such as actin and microtubules, molecular motors such as kinesins and myosins, and fusion machinery such as soluble N-ethylmaleimide-sensitive factor attachment protein receptors (SNAREs), and tethering factors. The physiological state and microenvironment of the donor cell effects the number of MVs produced, and the physiological state and microenvironment of the recipient cell effects the number of MVs consumed. MVs also have a number of marker proteins, including cytosolic and plasma membrane associated proteins, as well as cytoskeletal proteins, heat shock proteins, integrins, and proteins containing post-translational modifications, although there are no known specific markers to distinguish MVs from exosomes. Like exosomes, MVs can be loaded with cargo (such as proteins, nucleic acids, and lipids) for delivery to another cell, thereby altering the recipient cell's functions (Doyle and Wang (2019) Cells 8 (7): 727).

### c. Apoptotic Bodies

[0293] Apoptotic bodies are released by dying cells into the extracellular space, and have a diameter from 50 nm to 5000 nm. Apoptotic bodies are formed when the cell's plasma membrane separates from the cytoskeleton due to increased hydrostatic pressure after the cell contracts. Unlike exosomes and MVs, apoptotic bodies contain intact organelles, chromatin, and small amounts of glycosylated proteins (Doyle and Wang (2019) Cells 8 (7): 727).

### 2. Uptake of EVs

[0294] Cells internalize EVs by fusion with the plasma membrane, or more commonly by endocytosis (Abels et al. (2016) Cell Mol. Neurobiol. 36 (3): 301-312). Uptake via endocytosis can be through several types of endocytotic processes, and different processes have been described in different cell types: clathrin-dependent endocytosis and phagocytosis have been described in neurons, macropinocytosis in microglia, phagocytosis and receptor-mediated endocytosis in dendritic cells, caveolin-mediated endocytosis in epithelial cells, and cholesterol- and lipid raft-dependent endocytosis in tumor cells. Blocking heparin sulfate proteoglycans (HSPGs) on the plasma membrane with heparin reduces the uptake of EVs in cell culture, as does blocking the scavenger receptor type B-1 (SR-B1) with a synthetic nanoparticle mimic of HDL, which suggests a role for HSPGs and SR-B1 in EV uptake (Abels et al. (2016) Cell Mol. Neurobiol. 36 (3): 301-312). Fusion of EVs with the plasma membrane also is a method of uptake, and requires low pH conditions; treatment of EVs with the combination of a pH-sensitive fusogenic peptide with cationic lipids resulted in increased cellular uptake of exosomes and the cytosolic release of cargo within the exosomes (Nakase et al. (2015) Sci. Rep. 5:10112). Low pH conditions occur in tumors (Abels et al. (2016) Cell Mol. Neurobiol. 36 (3): 301-312), so that EVs for delivering therapeutic cargos to tumor cells can enter cells through fusion with the plasma membrane.

[0295] Like cells, EVs have extracellular receptors and ligands on the outside and cytoplasmic proteins and nucleic acids on the inside. They, thus, can communicate with cells in a variety of ways. EVs bind to the cell surface, undergo endocytosis, and/or fuse with the plasma membrane, and release their cargos in the extracellular space. If entering by endocytosis, the EV cargo must escape the degradative pathway; late endosomes can fuse with lysosomes or the plasma membrane, so cargo must exit before it is degraded in a lysosome or re-released through the fusion of MVBs with the plasma membrane. EVs that contain cargo, including mRNAs and non-coding RNAs, can be transferred to recipient cells in culture and in vivo (Abels et al. (2016) Cell Mol. Neurobiol. 36 (3): 301-312; Maas et al. (2017) Trends Cell Biol. 27 (3): 172-188).

### 3. General Methods for Isolating EVs

### a. Ultracentrifugation (UC)

[0296] Ultracentrifugation methods are used to isolate exosomes; alternative methods also have been developed. Due to the complex nature of the biological fluids from which exosomes are isolated, the overlap in physiochemical and biochemical properties between exosomes and other types of EVs, and the heterogeneity among exosomes, isolation methods can result in complex mixtures of EVs and other components of the extracellular space. Differential ultracentrifugation depends on the initial sedimentation of larger and denser particles from the extracellular matrix, and results in an enrichment of exosomes, but not a complete separation of exosomes from other components in the extracellular space. Density gradient centrifugation is another ultracentrifugation method and is based on separation by size and density in the presence of a density gradient (typically made of sucrose or iodoxinol) in the centrifuge tube. Density gradient centrifugation effectively separates EVs from protein aggregates and non-membranous particles but has low exosome recovery, although purity can be improved by coupling differential ultracentrifugation with types of density gradient centrifugation, such as rate-zonal centrifugation or isopycnic centrifugation (Doyle and Wang (2019) Cells 8 (7): 727).

### b. Size-Based Techniques

[0297] There are a number of size-based techniques for isolating exosomes (Doyle and Wang (2019) Cells 8 (7): 727). Ultrafiltration separates particles based on the size and molecular weight cut off of the membrane, whereby particles larger than the molecular weight cut off of the membrane are retained, and particles smaller than the molecular weight cut off of the membrane are passed through into the filtrate; low isolation efficiency can occur however if the filter becomes clogged and vesicles become trapped. The ExoMir Kit (Bioo Scientific; Austin, TX) is a commercially available kit in which two membranes (200 nm and 20 nm) are placed into a syringe and a sample (typically pre-treated with centrifugation and proteinase K) is passed through the syringe; the larger vesicles remain above the first 200 nm filter, the smallest vesicles are passed through the syringe and discarded, and the vesicles between 20 and 200 nm remain between the two filters in the syringe. Sequential filtration also relies on a series of filtration steps to isolate exosomes (Doyle and Wang (2019) Cells 8 (7): 727).

[0298] Tangential Flow Filtration (TFF) often is employed before UC or to replace UC for EV isolation and concentration of EVs to optimize the recovery of intact EV. TFF methods use to streams flow tangentially to a tubular filter membrane, which allows the passage of particles smaller than the pore size from the feed stream into the permeate stream and retains larger particles in the retentate stream. Depending on the choice of pore size the TFF can be used to purify and concentrate EVs and eliminate smaller contaminants. TFF can be applied to buffer exchange or for the product concentration in the retentate stream. TFF is a flexible and rapid methods to purify and concentrate EVs. TFF is scalable, industrialize The TFF does not alter the integrity of EVs or liposomes thus offer a gentler purification of EVs in comparison to UC and despite high purification yield of intact EVs but provides EVs with lower purity than UC. A process using TFF coupled with SEC enable more efficient removal of contaminant and similar yield of EVs compared to UC. (Paganini et al. (2019) Biotechnol. J. 14:1800528).

[0299] Size Exclusion Chromatography (SEC), often used in parallel with ultracentrifugation methods (in which the exosome pellet obtained from ultracentrifugation is resuspended and further purified using SEC), of exosomes is similar to using SEC to separate proteins. SEC can be used in parallel with TFF methods. In SEC, a column is packed with a porous stationary phase in which small particles can penetrate and thus elute after larger particles. Typically SEC methods require several hours of run time; however, the qEV Exosome Isolation Kit (iZON Science, New Zealand) allows for rapid and precise exosome isolation by SEC within 15 minutes (Doyle and Wang (2019) Cells 8 (7): 727).

[0300] In Flow Field-Flow Fractionation (FFFF), a sample injected into a chamber is subjected to parabolic flow as it is pushed down the chamber, in addition to a flow perpendicular to the parabolic flow, a crossflow, to separate particles in the sample. Larger particles are more affected by the crossflow and are pushed toward the walls of the chamber, which have a slower parabolic flow, and smaller particles remain in the center. Smaller particles elute earlier, and larger particles later, in FFFF (Doyle and Wang (2019) Cells 8 (7): 727).

[0301] In Hydrostatic Filtration Dialysis (HFD), hydrostatic pressure forces a sample through a dialysis tube with a membrane having a molecular weight cut off of 1000 kDa. The result is that small solutes are able to pass through the tube, but larger particles, including exosomes and EVs, remain in the tube and can then be further separated using, for example, ultracentrifugation (Doyle and Wang (2019) Cells 8 (7): 727).

### c. Immunoaffinity Capture-Based Techniques

[0302] Immunoaffinity capture-based techniques can isolate exosomes based on expression of an antigen on the surface of the exosome, and allow for the isolation of exosomes derived from a particular source. In these methods, an antibody specific for a target antigen can be attached to a plate (e.g., in Enzyme-Linked Immunosorbent Assay, ELISA), magnetic beads (e.g., in magneto-immunoprecipitation), resins and microfluidic devices; these surfaces are then exposed to the exosome sample, resulting in the immobilization of the exosomes expressing the antigen. This assay requires that the protein/antigen for isolating the exosomes be expressed on the surface of the exosomes, and its specificity is limited by the specificity of the antibody that is used, often resulting in a lower yield but higher purity of isolated exosomes. These methods also can be used to separate exosomes within mixed populations of EVs. Immunoaffinity capture-based techniques often are used after ultracentrifugation or ultrafiltration (Doyle and Wang (2019) Cells 8 (7): 727).

### d. Exosome Precipitation

[0303] Methods for precipitation of exomes include precipitation by polyethylene glycol (PEG) and lectin. In PEG precipitation, the PEG polymer ties-up the water molecules, allowing the other particles, including exosomes, to precipitate out of solution. PEG precipitation is quick and is not limited to the starting volume of solution, but lacks selectivity, as other EVs, extracellular proteins, and protein aggregates are precipitated with EVs. Sample pretreatment using filtration and/or ultracentrifugation can improve exosome yield. Commercially available kits for isolating exosomes using precipitation include, for example, ExoQuick (System Biosciences, Palo Alto, CA) and Total Exosome Isolation Kit (Thermo Fisher Scientific, Waltham, MA). Alternatively, lectin precipitation can be used, typically after ultracentrifugation, whereby lectins bind to carbohydrates on the surface of exosomes, altering their solubility and leading to their precipitation out of solution (Doyle and Wang (2019) Cells 8 (7): 727).

### e. Microfluidic Isolation Techniques

[0304] Microfluidic based techniques isolate exosomes based on their physical and biochemical properties simultaneously, and are rapid, efficient, and require small starting volumes. In acoustic nanofilter, a matrix containing EVs and other cellular components is injected into a chamber and exposed to ultrasound waves. The particles respond differently to the radiation forces exerted by the waves, depending on their size and density; large particles experience stronger forces and migrate faster toward the pressure nodes. The immuno-based microfluidic isolation technique is similar to that of an ELISA, although, unlike ELISAs, it does not require prior ultrafiltration or ultracentrifugation of exosomes (Doyle and Wang (2019) Cells 8 (7): 727). The ExoChip (Kanwar et al. (2014) Lab Chip. 14 (11): 1891-1900) and ExoSearch Chip (Zhao et al. (2016) Lab Chip. 16 (3): 489-496) have been developed to isolate exosomes using microfluidic technology.

### 4. Microalgae-Derived Extracellular Vesicles (MEVs)

[0305] Microalgae are bioresources for the production of EVs for use in nanomedicine and other fields. The mechanism of secretion of EVs from microalgae is known in relation to primary and motile cilia/flagella (Picciotto et al. (2021) Biomater. Sci. doi: 10.1039/d0bm01696a). EVs can be isolated from different microalgae strains, and the microalgae isolated EVs exhibit the key features of EVs. For example, eighteen (18) microalgae strains (Ankistrodesmus sp., Brachiomonas sp., Chlamydomonas reinhardtii, Dunaliella tertiolecta, Tetraselmis chuii, Chloromonas sp., Rhodella violacea, Kirchneriella sp., Pediastrum sp., Nannochloropsis sp., Cyanophora paradoxa, Cryptomonas pyrenoidifera, Phaeodactylum tricornutum, Phaeothamnion sp., Diacronema sp., Isochrysis galbana, Stauroneis sp., and Amphidinium sp.) from the main microalgae lineages were studied. These include strains with a variety of features such as saltwater and freshwater inhabitants, small and large sized cells, colonial and single cells, and species with sequenced genomes. EVs were isolated using a differential ultracentrifugation protocol and characterized following the International Society for Extracellular Vesicles (ISEV) guidelines, and all strains tested showed the presence of EVs in the culture medium. EV-producing microalgae strains were established based on the EV protein content, the expression of EV protein markers (e.g., Alix, Hsp70, enolase, and β-actin), the total scattering signal (measured by dynamic light scattering, DLS) or total particle number (measured by NTA), and the microalgae small EVs (sEVs, designated nanoalgosomes) average size and size range. Chlorella strains were not considered or tested nor considered for future study. The strains identified for future study were Cyanophora paradoxa, Tetraselmis chuii, Amphidinium sp., Rhodella violacea, Diacronema sp., Dunaliella tertiolecta, Phaeodactylum tricornutum, Pediastrum sp., and Phaeothamnion sp. the data for Cyanophora paradoxa showed ˜2×10⁹ sEV particles per mL of microalgae-conditioned media, with strong positive signals for EV markers, and a size distribution with a mode of 130±5 nm, in agreement with data from plant-derived vesicles. Cytotoxicity and genotoxicity studies showed that sEVs isolated from Cyanophora paradoxa, a freshwater Glaucophyte, did not show toxicity on the tumorigenic MDA-MB 231 breast cancer or C2C12 myoblast cell lines, neither over time nor at different concentrations, nor did MDA MB 231 cells treated with the sEVs show morphological nuclear changes associated with apoptotic events (Picciotto et al. (2021) Biomater. Sci. doi: 10.1039/d0bm01696a).

[0306] The studies did show that, in general, microalgae produce EVs that can be isolated using traditional methods; microalgae-derived EVs are similar in size and concentration, and exhibit similar markers compared to EVs isolated from other species; EVs isolated from microalgae do not show cytotoxic or genotoxic effects in vitro; and that microalgae-derived EVs can be taken up by cells. Such studies have not considered Chlorella species, nor assessed routes of administration, nor the fate of administered microalgae-derived EVs following administration.

[0307] EVs have been extracted from algal cells using ultra-centrifugation (Kuruvinashetti et al. (2020) 20th International Conference on Nanotechnology 354-357). This method is well established for the isolation of EVs. Algae cells are cultured; the cultured algal cells are collected and centrifuged; the supernatant is collected (and further centrifuged); a sucrose solution is added to the supernatant; and the algal supernatant with the sucrose solution is ultra-centrifuged; because of the sucrose solution, the high-density EVs settle at the bottom of the ultra-centrifugation tube and can be collected using a pipette. Extracted algal EVs can be characterized in size and concentration using Nanoparticle Tracking Analysis (NTA). Studies using this method have isolated green algal EVs that range in size from 25-200 nm, with a concentration of 0.89E8 to 0.94E8 particles/mL (Kuruvinashetti et al. (2020) 20th International Conference on Nanotechnology 354-357).

[0308] An ultra-centrifugation protocol also can be used to isolate EVs from marine microalgae grown under various conditions; NTA showed that the nano-particles have a size distribution between 100 and 200 nm, and western blotting of proteins confirmed the presence of EV markers (VES4US, Extracellular vesicles from a natural source for tailor-made nanomaterials, 2020). Subsequent studies have identified sEVs (nanoalgosomes), isolated from the marine photosynthetic microalgae chlorophyte Tetraselmis chuii. The production of nanoalgosomes is an evolutionarily conserved trait within microalgae strains as similar results were obtained using sEVs isolated from batch cultures of two other microalgae species, the chlorophyte Dunaliella tertiolecta, and the dinoflagellate Amphidinium sp. The nanoalgosomes were isolated using differential centrifugation (dUC) and tangential flow filtration (TFF), as well as gradient ultracentrifugation, which was used to further purify samples enriched for sEVs by TFF or dUC. The isolated nanoalgosomes were shown to share characteristics of EVs from other sources. The EV yield (measured by sEV protein content and sEV number) from dUC and TFF was consistent with reported numbers of isolated EVs, around 10⁹ EV particles/μg EV proteins. Biophysical analysis of particle size using multi-angle dynamic light scattering (DLS), nanoparticle tracking analysis (NTA), fluorescence nanoparticle tracking analysis (F-NTA), and fluorescence correlation spectroscopy (FCS) yielded consistent size distributions, with the size that appeared the most frequently from DLS (DLS mode) around 70 nm. Compared to exosomes derived from mammalian cells, which have a density of 1.15-1.19 g/mol, nanoalgosomes had a slightly lower density of 1.13 g/mol. Electron microscopy reveals that the nanoalgosomes are spherical, heterogeneous in size and shape, and possess a lipid-bilayer structure. Compared to the microvesicles (or large EVs, 1EVs) and lysates, the sEVs were enriched for three of the four target protein biomarkers (Alix, enolase, HSP70 and β-actin). DLS measurements indicated that the nanoalgosomes were resistant to changes in pH and stable in human blood plasma. The tumorigenic MDA-MB 231 breast cancer cell line, the non-tumorigenic 1-7 HB2 cell line, and the human hepatocarcinoma Hep G2 cell line did not show cytotoxic or genotoxic effects after nanoalgosome treatment. The nanoalgosome were taken up by the MDA-MB 231 and 1-7 HB2 cell lines (Adamo et al. (2021) J. Extracell. Vesicles 10: e12081).

[0309] It has been shown that EVs from mammalian origin can deliver cargo to a target cell and can have therapeutic use for delivery of a variety of cargos for treating a number of diseases or conditions. For example, macromolecular proteins and nucleic acids can be embedded into the exosomes. The nucleic acids can include those encoding a gene of interest. Specific targeting ligands, imaging probes, and covalent linkage could be attached to the exosome surface and tracked using NTA, fluorescence, or by bioluminescence. Other than speculation that microalgae EVs possibly might have a use for drug delivery (see, Kuruvinashetti et al. (2020) 20th International Conference on Nanotechnology 354-357), there is no published evidence nor technical descriptions that the uses described for mammalian EVs can be applied to or developed for microalgae-derived extracellular vesicles (MEVs). It is shown herein that MEVs can deliver cargo to target cells in animals, and that the biodistribution pathways are unique and appear to be different from the mammalian EV pathways.

[0310] As described and shown herein, however, MEVs have a number of advantages compared to existing drug delivery systems, such as, exosomes derived from mesenchymal stem cells, gold nanoparticles, liposomes and other plant- and animal-derived EVs. Mesenchymal stem cells are a commonly used source of exosomes, and exosomes derived from mesenchymal stem cells are used in drug delivery, for example anti-cancer vaccines, because they have enhanced passive targeting (a method of preparing a drug carrier system so that it remains circulating in the blood stream), as a result of their small size, indigenous nature, and ability to cross biological barriers. Mesenchymal stem cells, however, have limited secretion of exosomes, and scaling up production of exosomes is difficult due to the need to optimize purification, increase the homogeneity of exosomes, and establish efficient transfection strategies. Nanoparticles can lead to toxicity and current techniques for synthesizing nanoparticles are limited in their ability to scale for manufacturing purposes. Nanoparticle and liposome-based drug delivery methods also can lead to the formation of a teratoma (a tumor comprised of several different types of tissue). Liposome-based drug delivery methods have been further shown to be less efficient for internalization into a specific cell, tissue or organ, compared to exosomes. Plant-derived EVs, such as those from curcumin, ginger, grapefruit, and lemon, have been used for drug delivery, but their extraction process and use in treatment has not yet been optimized. The production of EVs from agricultural products, such as fruits and milk, is economically impractical and need 3-4 months to grow, compared to algal EVs, which can be grown anywhere and within a few days. Kuruvinashetti et al. (2020) 20th International Conference on Nanotechnology 354-357, discussed above does not describe the use of Chlorella species as a source of EVs, nor its advantages as a source nor the production of and use of genetically-modified microalgae to produce EVs that are endogenously loaded with heterologous bioactive molecules.

### 5. Green Algae-Chlorella Species

[0311] Previous studies and consideration of EVs have not focused on nor assessed Chlorella species as sources of EVs. Chlorella and the resulting EVs have advantages for growth, manipulation, and administration of drugs that other species and EVs do not provide. Green algae belong to phylum Chlorophyta, and encompass a diverse group of photosynthetic eukaryotes. Green algae include unicellular and multicellular organisms. Algae originally included in the genus Chlorella are among the most widely distributed and frequently encountered algae in freshwater. These algae exist in aqueous environments and on land. They are typically small (˜2 to 10 μm in diameter), unicellular, spherical in shape, non-motile, and contain a single chloroplast, and some have a rigid cell wall (Blanc et al. (2010) Plant Cell 22 (9): 2943-2955).

[0312] Molecular analyses have separated Chlorella species into two classes of chlorophytes: the Trebouxiophyceae, which contains the true Chlorella, and the Chlorophyceae. For use herein, Chlorella species include any that can be or that are used as food complement or that can be consumed by humans or other animals, such as livestock. Exemplary species include, but are not limited to, the species: Chlorella ellipsoidea, Chlorella pyrenoidosa, Chlorella sorokiniana, Chlorella vulgaris, and Chlorella variabilis.

[0313] True Chlorella species are characterized by glucosamine as a major component of their rigid cell walls. Although most Chlorella species are naturally free-living, the Trebouxiophyceae include most of the known green algal endosymbionts, living in lichens, unicellular eukaryotes, plants, and animals (for example mussels and hydra). For example, Chlorella variabilis NC64A is a hereditary photosynthetic endosymbiont (or photobiont) of Paramecium bursaria, a unicellular protozoan, and NC64A also is a host for a family of large double-stranded DNA viruses that are occur in freshwater (Blanc et al. (2010) Plant Cell 22 (9): 2943-2955).

### a. Life Cycle

[0314] In unicellular organisms, such as microalgae, life cycle is the same as the cell cycle. Chlorella is a haploid organism that reproduces asexually by autosporulation. The cell cycle and proliferation of Chlorella vulgaris has been investigated using flow cytometric analysis of 5-,6-carboxyfluorescein diacetate succinimidyl ester (CFSE)-stained algal cells (see, Rioboo et al. (2009) doi: 10.1016/j.aquatox.2009.07.009). The results indicate that, as generally described for microalgae, the growth of C. vulgaris mother cells takes place during light periods, whereas cytoplasmic division and liberation of daughter cells takes place during dark periods. C. vulgaris also shows a distinct light/dark cycle, marked by an increase in cell size, cell complexity, and autofluorescence during periods of light, measured over a 96-hour period. A monoparametric histogram of CFSE-stained C. vulgaris cells showing only one peak of daughter cells indicates that each mother cell undergoes only one division cycle in 96 hours; the cytoplasmic division was further shown to take place during periods of darkness. Thus, the strain of C. vulgaris used exhibits three life cycle phases: 1) growth of mother cells, 2) cell division, and 3) liberation of daughter cells. C. vulgaris cells grew during 2 light periods and began to divide during following dark period; cell division occurs once the mother cells are double the size of daughter cells. Furthermore, C. vulgaris cells exposed to the herbicide terbutryn need a longer growth period in order to reach a large enough cell size to divide. This suggests there is a critical threshold size needed for C. vulgaris to complete the growth phase and begin the division phase, and that this critical threshold can control the progression of the G1 phase of the C. vulgaris cell cycle. Finally, this study demonstrates that the intensity of the peak of CFSE-fluorescence of mother cells is four times greater than that of the daughter cells, indicating that 4 daughter cells are produced from each mother cell. Thus, C. vulgaris cells undergo a first mitosis followed by cytoplasmic division, and then two other simultaneous mitoses, which result in the liberation of 4 daughter cells (Rioboo et al. (2009) doi: 10.1016/j.aquatox.2009.07.009).

### b. Genomic Analyses of Chlorella Species

[0315] Although species of Chlorella are reported to be non-motile and lack a sexual cycle, genomic analyses of Chlorella variabilis NC64A (NC64A) and Chlorella vulgaris 211/11P (211/11P) reveal the presence of genes involved in sexual reproduction and motility (Blanc et al. (2010) Plant Cell 22 (9): 2943-2955; Cecchin et al. (2019) Plant J. 100 (6): 1289-1305). The NC64A nuclear genome (GenBank Accession No. ADIC00000000.1) is 46.2 Mb, and composed of 12 chromosomes. The meiosis-specific proteins dosage suppressor of MCK1 DMC1, homologous-pairing proteins HOP1 and HOP2, meiotic recombination protein MER3, meiotic nuclear division protein MND1, and mutS homolog protein MSH4 are encoded in NC64A; these genes also occur in most of the other sequenced chlorophyte algal species. Nineteen homologs of the microalgae Chlamydomonas gametolysin proteins, which promote disassembly of the gametic cells walls and allow gamete fusion, also were identified in NC64A. Additionally, an ortholog of the Chlamydomonas GCS1 protein, which is essential for cell fusion, occurs in NC64A (Blanc et al. (2010) Plant Cell 22 (9): 2943-2955). The primary genes involved in meiosis also occur in the Chlorella vulgaris 211/11P 40 Mb genome (GenBank Accession No. SIDB00000000), in addition to the gene encoding gametolysin (g3347), and a gene encoding a protein that contains a domain with a putative GCS1/HAP2 function (Cecchin et al. (2019) Plant J. 100 (6): 1289-1305). Thus, although Chlorella species have been observed only in the haploid phase, the presence of meiosis genes indicates that the life cycle of Chlorella could include a diploid phase.

[0316] Similarly, while flagella have not been observed in NC64A, orthologs of the Chlamydomonas flagellar proteins were identified in the NC64A genome, including orthologs to the intraflagellar transport (IFT) proteins IFT52, IFT57, and IFT88, kinesin-2 motor protein FLA8, the kinesin-associated protein KAP, and proteins involved in the axonemal outer dynein arm (Blanc et al. (2010) Plant Cell 22 (9): 2943-2955).

[0317] Sequencing of three Chlorella sorokiniana strains, strain 1228, UTEX 1230, and DOE1412, reveals the presence of sex- and flagella-related genes (Hovde et al. (2018) Algal Research 35:449-461). The genome of several other Chlorella species has been sequenced: Chlorella protothecoides sp. 0710 (Gao et al. (2014) BMC Genomics 15 (1): 582; GenBank Accession No. APJO00000000); Chlorella sorokiniana UTEX 1602 (GenBank Accession No. LHPG00000000) and Chlorella sp. strain SAG 241.80 (Micractinium conductrix; GenBank Accession No. LHPF00000000) (Arriola et al. (2018) Plant J. 93 (3): 566-586); and the Chlorella vulgaris strains UTEX 395 (Guarnieri et al. (2018) Front. Bioeng. Biotechnol. 6:37; GenBank Accession No. LDKB00000000), UMT-M1 (Teh et al. (2019) Data Brief 27:104680; GenBank Accession No. VJNP00000000), UTEX 259 (GenBank Accession No. VATW00000000) and NJ-7 (Wang et al. (2020) Mol. Biol. Evol. 37 (3): 849-863; GenBank Accession No. VATV00000000).

### c. Commercial and Biotechnological Uses of Chlorella

[0318] The commercial cultivation of microalgae for food purposes began with the production of Chlorella vulgaris in Japan and Taiwan in the 1960s. Dried biomass products from Arthrospira and Chlorella are included in dietary supplements due to reports of high protein content, nutritive value, and health benefits. For example, Chlorella extracts have been shown to lower cholesterol and have antioxidant, antibacterial, and antitumor activities. Production of high yields of Chlorella is routine, and, as detailed herein, Chlorella MEVs can be isolated from the cell culture medium. For its use as a pharmaceutical, it is known that ingestion of Chlorella is non-toxic and non-immunogenic in humans.

[0319] Chlorella has been used in a variety of biotechnology applications, including biofuels, sequestering CO₂, producing molecules of high economic value, or removing heavy metals from wastewaters (Blanc et al. (2010) Plant Cell 22 (9): 2943-2955). Chlorella species show metabolic flexibility in response to environmental perturbations, and are capable of using nutrients, such as organic carbon and minerals, directly from wastewater for growth. Among microalgae, Chlorella species have higher photosynthetic efficiency over other photosynthetic organisms. Additionally, Chlorella vulgaris is able to grow either in autotrophic, heterotrophic or mixotrophic conditions (Zuñiga et al. (2016) Plant Physiol. 172 (1): 589-602).

[0320] Chlorella species also can be genetically modified by Agrobacterium-mediated transformation. A study by Cha et al. developed a method to genetically transform Chlorella vulgaris using the Agrobacterium tumefaciens strain LBA4404, and the presence of gene fragments in 30% of the transgenic lines, compared to the wild-type non-infected Chlorella, indicates the T-DNA was integrated into the Chlorella genome (Cha et al. (2012) World J. Microbiol. Biotechnol. 28:1771-1779).

### d. Chlorella MEVs

[0321] As described herein, Chlorella species, such as C. vulgaris, are advantageous species for the production of EVs, referred to herein as MEVs, for use for delivery of biomolecules for many applications, including therapeutic, diagnostic, and cosmetic uses. Of particular interest herein are MEVs produced by Chlorella species. Chlorella EVs have not been exploited as sources of MEVs for endogenous loading of heterologous biomolecular products. Chlorella, as a source of EVs for such applications, provides numerous advantages. Chlorella is a haploid organism, which means that specific and targeted variants can be produced by genetic engineering; it readily can be genetically modified to produce or contain heterologous biologically active molecules. Stable cell lines can be produced, including stable producers of encoded heterologous products. They are defined products, and, when endogenously loaded by the microalgae, the resulting compositions contain MEVs that carry the same heterologous products as a cargo.

[0322] Detailed genetic maps can be obtained, and correlations between genotype and phenotype can be established. Chlorella genomes have been fully sequenced, so the structure and function of various genes can be known. Phylogenetically, Chlorella is at the very crossroads between higher plants and microalgae. As such, Chlorella shares with higher plants a significant (and useful) number of molecular biological and metabolic features, but still is a unicellular haploid microalgae. Exemplary of molecular biological features shared with eukaryotes is the intracellular machinery that involves the dicer enzyme system for processing endogenous RNA into siRNA. Chlorella is autotrophic: unlike mammalian and other animal cells, it can therefore be cultured and reproduced without the need for nutrients or factors of animal origin.

[0323] With respect to use of its EVs as therapeutics, Chlorella species are not toxic. For example, tablets made from Chlorella vulgaris biomass (i.e. compressed whole Chlorella cells) have been consumed regularly for years by the public worldwide as a dietary supplement, without constraints related to toxicity or immunogenicity. Japan is the world leader in the consumption of Chlorella biomass. It also is used, for example, in Japan, for medical treatments because it has shown to have immunomodulatory properties and purported anti-cancer activities, for use for anti-aging applications, such as for cardiovascular diseases, hypertension and cataracts; it reduces the risk of atherosclerosis and stimulates the synthesis of collagen for the skin.

[0324] Chlorella cells naturally produce extracellular vesicles that respond to the ‘standard specifications’ of better known EVs (such as mammalian EVs). EVs from plant origin bear a number of features that make them more promising/convenient than synthetic nanoparticles or semisynthetic EVs, for use as a drug delivery system in humans. These include, for example, higher stability, lower toxicity, and lower immunogenicity. Since they are close to plants, Chlorella provides a source of MEVs with similar characteristics to plant EVs. At the same time, mass production of Chlorella in large scale is easier and cheaper than for higher plants. The glycosylation pattern of membrane proteins in Chlorella is similar/identical to the glycosylation pattern present in higher plants.

[0325] The size of the Chlorella MEVs ranges between about or between 50 nm and 200 nm, with an average size of about 130 nm. The morphology resembles plant and mammalian exosomes. For use for administration, the size distribution can be rendered more uniform by separating the MEVs by size and selecting those of a size of interest, which can vary depending upon the intended use and route of administration.

### D. Endogenously Loaded (Endo-Loaded) Microalgae Extracellular Vesicles (Mevs), Heterologous Cargo, and Targets

[0326] For endo-loaded MEVs, DNA encoding a product of interest, such as a protein, mRNA, synthetic pathway, or other product, is introduced into the microalgae cell by any suitable method. Methods for introducing DNA into a microalgae cell are known in the art (for a review see, e.g., Gutierrez et al. (2021) Biology 10:265). Heterologous DNA can be introduced into microalgae by a variety of methods, including but not limited to, mechanical agitation, surfactant permeabilization, electroporation, particle bombardment, bacterial DNA transfer, nanoparticles, liposomes, and cell penetrating peptides or cell penetrating polymers to mediate penetration into the cell, and other methods known to those of skill in the art for introducing DNA into plant cells, particularly microalgae cells. For examples, microalgae cells can be transformed by Agrobacterium tumefaciens transformation using the Ti plasmid of the agrobacterium. This process is well-known to those of skill in the art. The Ti plasmid, into which DNA of interest can be cloned, introduces DNA into the microalgae genome. The DNA of interest integrates into the microalgae genome. To prepare endo-loaded MEVs, DNA that encodes the heterologous product to be endo-loaded in the MEVs, is introduced into the microalgae and the microalgae produces the heterologous product, such as a protein, or mRNA.

[0327] Targets and cargo (see discussions below) include any known to those of skill in the art. For endo-loading, the heterologous product must be one that is produced by or loaded into the microalgae cell, and from the cell into the cell-produced MEVs.

### 1. Choice and Preparation of Cargo

[0328] The MEVs can be endogenously loaded with any suitable heterologous cargo, including, but not limited to, nucleic acid molecules, including, for example RNAi, such as siRNA, miRNA, lncRNA, and mRNA, including modified mRNA, encoding coding any protein, polypeptide and peptide, detectable marker proteins and tags or any therapeutic or prophylactic or vaccine polypeptide or peptide, gene editing systems, and others, and combinations thereof. The MEVs can deliver therapeutic molecules, can serve as vaccines, and can be used in human health, gene therapy applications, including delivery genes, modification of genes with gene editing systems, and gene silencing nucleic acids, cosmetic applications, dermatological applications, diagnostic applications, industrial uses, and others. The MEVs can deliver regulators of gene pathways to produce a beneficial product, and can be used to deliver gene editing systems, such as CRISPR/cas (see e.g., SEQ ID NOs: 70 and 71 for exemplary CRISPR/cas protein and encoding nucleic sequences, respectively) to effect gene editing.

[0329] Diseases and conditions that can be treated include any known to those of skill in the art, including but not limited to, cardiovascular diseases, metabolic diseases, infections, including respiratory infections, bladder infections and other urinary tract infections, infectious diseases, including viral diseases, such as hepatitis, HIV, corona viruses, including SARS-COV-2, CNS diseases, ocular diseases, and liver diseases. As discussed, delivered cargo includes protein products, such as, but not limited to, enzymes, regulatory factors, signaling proteins, antigens, antibodies and antigen-binding forms thereof, RNA products, such as, but not limited to, siRNA, miRNA (micro RNA), lncRNA (long non-coding RNA), saRNA (small activating RNA), shRNA, and mRNA, including modified mRNA, such as modified mRNA to increase stability for delivery.

[0330] An advantage of MEVs for delivery, is that the RNA is a labile molecule, and so, mRNAs delivered by other kinds of nanoparticles, like lipid nanoparticles (LNPs) have been modified to increase RNA stability. For delivery in MEVs, the mRNA does not necessarily have to be modified. For endo-loading, the mRNA, in general, the mRNA will be unmodified.

[0331] Modified mRNA, which in general will not be for endo-loaded MEVs, can be synthetic mRNA that comprises a translatable region that contains at least one nucleoside modification in which at least a percentage of the uridine nucleotides in the synthetic mRNA are modified (see, e.g., U.S. Pat. No. 9,464,124, which describes modified mRNA for delivery and translation). For example, at least one nucleoside modification can be pyridin-4-one ribonucleoside, 5-aza-uridine, 2-thio-5-aza-uridine, 2-thiouridine, 4-thio-pseudouridine, 2-thio-pseudouridine, 5-hydroxyuridine, 3-methyluridine, 5-carboxymethyl-uridine, 1-carboxymethyl-pseudouridine, 5-propynyl-uridine, 1-propynyl-pseudouridine, 5-taurinomethyluridine, 1-taurinomethyl-pseudouridine, 5-taurinomethyl-2-thio-uridine, 1-taurinomethyl-4-thio-uridine, 5-methyl-uridine, 1-methyl-pseudouridine, 4-thio-1-methyl-pseudouridine, 2-thio-1-methyl-pseudouridine, 1-methyl-1-deaza-pseudouridine, 2-thio-1-methyl-1-deaza-pseudouridine, dihydrouridine, dihydropseudouridine, 2-thio-dihydrouridine, 2-thio-dihydropseudouridine, 2-methoxyuridine, 2-methoxy-4-thio-uridine, 4-methoxy-pseudouridine, 4-methoxy-2-thio-pseudouridine, 5-aza-cytidine, pseudoisocytidine, 3-methyl-cytidine, N4-acetylcytidine, 5-formylcytidine, N4-methylcytidine, 5-hydroxymethylcytidine, 1-methyl-pseudoisocytidine, pyrrolo-cytidine, pyrrolo-pseudoisocytidine, 2-thio-cytidine, 2-thio-5-methyl-cytidine, 4-thio-pseudoisocytidine, 4-thio-1-methyl-pseudoisocytidine, 4-thio-1-methyl-1-deaza-pseudoisocytidine, 1-methyl-1-deaza-pseudoisocytidine, zebularine, 5-aza-zebularine, 5-methyl-zebularine, 5-aza-2-thio-zebularine, 2-thio-zebularine, 2-methoxy-cytidine, 2-methoxy-5-methyl-cytidine, 4-methoxy-pseudoisocytidine, 4-methoxy-1-methyl-pseudoisocytidine, 2-aminopurine, 2,6-diaminopurine, 7-deaza-adenine, 7-deaza-8-aza-adenine, 7-deaza-2-aminopurine, 7-deaza-8-aza-2-aminopurine, 7-deaza-2,6-diaminopurine, 7-deaza-8-aza-2,6-diaminopurine, 1-methyladenosine, N6-methyladenosine, N6-isopentenyladenosine, N6-(cis-hydroxyisopentenyl) adenosine, 2-methylthio-N6-(cis-hydroxyisopentenyl) adenosine, N6-glycinylcarbamoyladenosine, N6-threonylcarbamoyladenosine, 2-methylthio-N6-threonyl carbamoyladenosine, N6,N6-dimethyladenosine, 7-methyladenine, 2-methylthio-adenine, 2-methoxy-adenine, inosine, 1-methyl-inosine, wyosine, wybutosine, 7-deaza-guanosine, 7-deaza-8-aza-guanosine, 6-thio-guanosine, 6-thio-7-deaza-guanosine, 6-thio-7-deaza-8-aza-guanosine, 7-methyl-guanosine, 6-thio-7-methyl-guanosine, 7-methylinosine, 6-methoxy-guanosine, 1-methylguanosine, N2-methylguanosine, N2,N2-dimethylguanosine, 8-oxo-guanosine, 7-methyl-8-oxo-guanosine, 1-methyl-6-thio-guanosine, N2-methyl-6-thio-guanosine, and N2,N2-dimethyl-6-thio-guanosine. The mRNA can include a) a sequence of linked nucleotides, a 5′ UTR, a 3′ UTR, and at least one 5′ cap structure. The mRNA also can include other regulatory sequences for translation and trafficking in a eukaryotic, such as a mammalian, such as a human, host cell.

[0332] The MEVs can carry cargos that include reporter genes and proteins and other detectable products, such as, for example, a fluorescent protein, such as, but not limited to an enhanced green fluorescent protein (EGFP; SEQ ID NO:10), a luciferase gene (SEQ ID NO:11), luxA (SEQ ID NO:8), luxB (SEQ ID NO:9), and the Lux operon (luxCDABE and luxABCDE; SEQ ID NO:12).

[0333] Other cargos can target genes or products involved in diseases, such as, but not limited to, Peptidyl-prolyl cis-trans isomerase FKBP4 or FKBP52 (SEQ ID NO: 1); gamma-aminobutyric acid type B receptor subunit 1 (GABBR1; SEQ ID NO: 3); oncogenes such as MYCN or NMYC (SEQ ID NO:38), RAS (H-RAS, N-RAS, and K-RAS; see SEQ ID NOs: 39, 40, and 41, respectively), BCL2 (SEQ ID NO: 43), and PLK1 (SEQ ID NO:44). Genes involved in diseases, such as oncogenes, and checkpoints, can be modulated by cargo that encodes a product that inhibits or agonizes expression of a gene, or inhibits or agonizes a gene product. Exemplary of such modulators, are RNAis, such as, for example, siRNAs, miRNAs, shRNAs, peptides and/or tetratricopeptides. For example, siRNAs and ASOs targeting EGFP (SEQ ID NOs: 5 and 6), firefly luciferase (SEQ ID NO:7), MYCN (SEQ ID NOs: 13-19), RAS (SEQ ID NOs: 20-27), BCL2 (SEQ ID NOs: 29-31), and PLK1 (SEQ ID NOs: 32-35), and microRNA-34A, which targets MYC and BCL2 (SEQ ID NO:28), are exemplified herein.

[0334] Gene silencing using RNA interference, including siRNAs and miRNAs, can be used to silence developmental genes, such as, for example, adhesion molecules, cyclin kinase inhibitors, Wnt family members, Pax family members, Winged helix family members, Hox family members, cytokines/lymphokines and their receptors, growth/differentiation factors and their receptors, and neurotransmitters and their receptors; oncogenes; tumor suppressor genes; enzymes; genes associated with a pathological condition; genes associated with autoimmune diseases; anti-angiogenic genes; angiogenic genes; immunomodulator genes; genes associated with alcohol metabolism and liver function; genes associated with neurological disease; genes associated with tumorigenesis or cell transformation; and genes associated with metabolic diseases and disorders (see, e.g., WO 2009/082606, JP 2014-240428A, WO 2011/072292A2, WO 2010/141724, and WO 2020/097540). These types of heterologous products can be delivered in or encoded in MEVs to activate genes or pathways or to provide therapeutic effects. Certain cytokines can be used to treat diseases/disorders, such as certain cancers, in which immune suppression plays a role.

[0335] Endogenously-loaded MEVs can be used to transfer therapeutic agents such as nucleic acids, such as microRNA, mRNA, tRNA, IRNA, siRNA, regulatory RNA, non-coding and encoding RNA, and DNA fragments (see, e.g., CN105821081A and CN110699382A); nucleotides or amino acids comprising a detectable moiety; polypeptides (e.g., enzymes) (see, U.S. Pat. No. 10,195,290). Non-limiting examples of proteins that may be encoded for by the nucleic acid cargo molecule include, but are not limited to: antibodies, intrabodies, single chain variable fragments, affibodies, enzymes, transporters, tumor suppressors, viral or bacterial inhibitors, cell component proteins, DNA and/or RNA binding proteins, DNA repair inhibitors, nucleases, proteinases, integrases, transcription factors, growth factors, apoptosis inhibitors and inducers, toxins, structural proteins, neurotrophic factors, membrane transporters, nucleotide binding proteins, heat shock proteins, CRISPR-associated proteins, cytokines, cytokine receptors, caspases and any combination and/or derivatives thereof (see, e.g., AU2018365299).

[0336] Cargo bioactive molecules can target central nervous system diseases, such as neurodegenerative diseases, such as Alzheimer's Disease. Exemplary of such is FKBP52 and the tetratricopeptide derivative therefrom. The full sequence of human peptidyl-prolyl cis-trans isomerase FKBP4 is (SEQ ID NO:1):

MTAEEMKATESGAQSAPLPMEGVDISPKQDEGVLKVIKREGTGTEMPMI
GDRVFVHYTGWLLDGTKFDSSLDRKDKFSFDLGKGEVIKAWDIAIATMK
VGEVCHITCKPEYAYGSAGSPPKIPPNATLVFEVELFEFKGEDLTEEED
GGIIRRIQTRGEGYAKPNEGAIVEVALEGYYKDKLFDQRELRFEIGEGE
NLDLPYGLERAIQRMEKGEHSIVYLKPSYAFGSVGKEKFQIPPNAELKY
ELHLKSFEKAKESWEMNSEEKLEQSTIVKERGTVYFKEGKYKQALLQYK
KIVSWLEYESSESNEEAQKAQALRLASHLNLAMCHLKLQAFSAAIESCN
KALELDSNNEKGLFRRGEAHLAVNDFELARADFQKVLQLYPNNKAAKTQ
LAVCQQRIRRQLAREKKLYANMFERLAEEENKAKAEASSGDHPTDTEMK
EEQKSNTAGSQSQVETEA

### The Tetratricopeptide Repeat (TPR) Domain 260-400 is (SEQ ID NO:2):

MNSEEKLEQSTIVKERGTVYFKEGKYKQALLQYKKIVSWLEYESSFSNE
EAQKAQALRLASHLNLAMCHLKLQAFSAAIESCNKALELDSNNEKGLER
RGEAHLAVNDFELARADFQKVLQLYPNNKAAKTQLAVCQQRI

[0337] For example, cargo can be delivered or encoded in MEVs for treatment of Alzheimer's Disease by preventing accumulation of Tau. An in vitro model is available and was developed by a group from Institut National de la Santé et de la Recherche Médicale, Université Paris XI (see, Chambraud et al. (2007) FASEB J. 21 (11): 2787-97; and Chambraud et al. (2010) Proc. Natl. Acad. Sci. U.S.A. 107 (6): 2658-63). The effect of depletion of FKBP52 in PC12 cultured cells was examined by introducing two different small, interfering RNA (siRNA) duplexes specific for rat FKBP52, named RNAi 1 and RNAi 2. The sense sequence of siRNAs and an oligonucleotide duplex with a scrambled sequence corresponding to RNAi 1 were used as negative control. In these experiments, the level of FKBP52 analyzed by Western blot was substantially reduced after 48 h and remained low 72 h post-transfection. Tubulin and FKBP52 stainings were performed 72 h post transfections. In cells transfected with RNAi 1 or 2, FKBP52 staining was significantly lower than that observed in control cells, and tubulin staining revealed a change in the PC12 cell phenotype—in particular, the loss of FKBP52 in PC12 cells results in these cells forming extensions. Therefore, these cells acquired a differentiated phenotype that could be compared with PC12 cells treated with NGF. No significant modification could be observed in cells transfected with controls. In another study, Chambraud et al. ((2010) Proc. Natl. Acad. Sci. U.S.A. 107 (6): 2658-63) reports that FKBP52 prevents Tau Accumulation and Neurite Outgrowth in PC12 Cells. The FKBP52-inducible expression system based on a tetracycline-responsive element was used. The system allows the generation of a stably transformed PC12 cell line to determine a cellular role for FKBP52. Among clones that were positively tested, one clone, so-called H7C2, was selected and used to study the effects of FKBP52 overexpression on PC12 cells and to further investigate the relationship between FKBP52 and Tau. Under basal conditions, H7C2 cells expressed endogenous FKBP52, and treatment with doxycycline (Dox) resulted in a marked increase of recombinant FKBP52 protein expression. FKBP52 induction in H7C2 cells was about four-fold after 5 days of Dox treatment. Next, the effect of FKBP52 on the accumulation of Tau was examined. The amount of Tau protein was determined by Western blotting of extracts from cultures of either PC12 cells or H7C2 cells, treated with or without nerve growth factor (NGF) (50 nM) for 5 days with or without Dox. In PC12 cells, FKBP52 expression was unchanged after treatment with NGF. As expected, in both PC12 and H7C2 cells an increase in Tau was observed after NGF treatment. When H7C2 cells were exposed to Dox in addition to NGF, so that they overexpress FKBP52, no additional accumulation of Tau protein occurred. An increase in Tau protein was still observed in PC12 cells treated with NGF and Dox, ruling out the possibility that Dox was responsible for the lack of decrease in Tau. The report concludes that FKBP52 prevents the accumulation of Tau induced by NGF in PC12 cells.

[0338] Because one role of Tau is to stimulate neurite outgrowth, the consequence of FKBP52 overexpression on neurite length in PC12 and H7C2 cells also was investigated. In the absence of NGF, no neurite outgrowth was observed in H7C2 cells, whether or not they were treated with Dox for a week. In H7C2 cells treated with 50 nM NGF and Dox, a 40% (+7) decrease in neurite length, compared to control (H7C2 not treated with Dox) was observed. The same effect of Dox on neurite length was observed in H7C2 cells treated with 10 or 20 nM NGF. Dox by itself was not involved in the process of neurite outgrowth because there was no difference in neurite length between Dox-treated and untreated PC12 cells observed. The inhibition of neurite outgrowth resulting from FKBP52 overexpression is in agreement with the previous report (Chambraud et al. (2010) Proc. Natl. Acad. Sci. U.S.A. 107 (6): 2658-63) showing that the loss of FKBP52 in PC12 cells results in the formation of neurite extensions. The FKBP52 effect on neurite length could be explained by the binding of Tau to FKBP52, removing Tau from microtubules. The prevention of Tau accumulation by overexpression of FKBP52 is consistent with the decrease of neurite length and is indicative of a role of this immunophilin in Tau function. Hence, the above target and sequences can be delivered or encoded in MEVs for treatment of Alzheimer's Disease by preventing accumulation of Tau.

Porphyromonas gingivalis has been identified in the brains of patients with Alzheimer's disease (AD). P. gingivalis has been identified as a risk factor for AD, and its components, gingipains and lipopolysaccharides, have been shown to cause AD-like neurodegeneration in infected neurons derived from induced pluripotent stem cells in in vitro culture system with persistent expression of active gingipains. P. gingivalis has been detected in the brain tissues of AD patients and associated with pathological changes. The MEVs herein can be loaded with agents that inhibit P. gingivalis, and/or gingipains to prevent or treat AD. It has been proposed that the amyloid pathway is an inflammatory response to the infection and the toxic products, including the gingipains. The resulting amyloid plaque and abnormal protein tau can be a source of the neuroinflammation and neurodegeneration (see, e.g., Seymour et al. (2022) J. Exploratory Res. in Pharmacology 7:45-53). The MEVs provided herein can be loaded with inhibitors of the bacterium and/or inhibitor, such as atuzaginstat, of the gingipains, and delivered via intranasal administration, to the brain, including to neurons.
Reporter Genes, Reporter Proteins, and/or Modulators Thereof can be Delivered in the MEVs.
Reporter proteins

[0339] Target sequences, in the form of siRNAs, miRNAs to modulate (inhibition or stimulation) of each of the marker genes, such as a beta-glucuronidase (GUS), green fluorescent protein (GFP) a eukaryotic luciferase, or a prokaryotic Luciferase, such as: Lux operon (luxCDABE) and lux operon (luxABCDE), can be used, for example for diagnostics and gene expression assessments (SEQ ID NOs: 72-77, 5, 6, 7, and 62-65, respectively). Exemplary siRNAs that target the encoding nucleic acid are set forth in the following table:

| Target | Type of | | SEQ ID |
|---|---|---|---|
| gene | sequence | Sequence(s) | NO: |
| GUS | siRNA¹ | GT1 sense: 5′- | 72 |
| | | TACACTGTGGAATTGATCAGCGTTCAGATGACGCTGATCA | 73 |
| | | ATTCCACAGTTTTTTTT | 74 |
| | | GT1 antisense: 5′- | |
| | | CTAGAAAAAAAACTGTGGAATTGATCAGCGTCATCTGAA | |
| | | CGCTGATCAATTCCACAGTGTA | |
| | | GT2 sense: 5′- | |
| | | TACTTGATCAGCGTTGGTGGGATTCAGATGATCCCACCAA | 75 |
| | | CGCTGATCAATTTTTTT | |
| | | GT2 antisense: 5′- | |
| | | CTAGAAAAAAATTGATCAGCGTTGGTGGGATCATCTGAA | |
| | | TCCCACCAACGCTGATCAAGTA | |
| | | GT3 sense: 5′- | 76 |
| | | TACCTGTGGAATTGATCAGCGTTTCAGATGAACGCTGATC | 77 |
| | | AATTCCACAGTTTTTTT | |
| | | GT3 antisense: 5′- | |
| | | CTAGAAAAAAACTGTGGAATTGATCAGCGTTCATCTGAA | |
| | | ACGCTGATCAATTCCACAGGTA | |
| DEGFP | siRNA | sense: 5′-GCAAGCUGACCCUGAAGUUCAUUU-3′ | 5 |
| | | antisense: 5′-AUGAACUUCAGGGUCAGCUUGCCG-3′ | 6 |
| firefly | shRNA | 5′-CTGACGCGGAATACTTCGA-3′ | 7 |
| luci- | | | |
| ferase | | | |
| luxA | siRNA | sense: 5′-CAAACAGAGGUAAUGAAAUGGUUG-3′ | 62 |
| (Lux | | antisense: 3′-CAACCAUUUCAUUACCUCUGUUUG-5′ | 63 |
| operon) | | | |
| luxB | siRNA | sense: 5′-AUGUUAAGUUGAAUAAGUUCUGCA-3′ | 64 |
| (Lux | | antisense: 3′-UGCUCUUGAAUAAGUUGAAUUGAU-5′ | 65 |
| operon) | | | |

¹Lu et al., (2004). RNA silencing in plants by the expression of siRNA duplexes. Nucleic Acids Research, 32(21): e171).

The GUS coding sequence is set forth in SEQ ID NO:78, and the encoded protein in SEQ ID NO:79 (see, doi.org/10.1093/nar/gnh170); also in SEQ ID NOs: 59 and 60.

[0340] Heterologous cargo includes, for example, anti-angiogenic agents. Anti-angiogenic agents can be a protein, such as an antibody, Fc fusion, and cytokine, that binds to a growth factor or growth factor receptor involved in promoting angiogenesis. Examples of anti-angiogenic agents include but are not limited to antibodies that bind to Vascular Endothelial Growth Factor (VEGF) or that bind to VEGF-R, RNA-based therapeutics that reduce levels of VEGF or VEGF-R expression, VEGF-toxin fusions, Regeneron's VEGF-trap, angiostatin (plasminogen fragment), antithrombin III, angiozyme, ABT-627, Bay 12-9566, BeneFin, bevacizumab, bisphosphonates, BMS-275291, cartilage-derived inhibitor (CDI), CAI, CD59 complement fragment, CEP-7055, Col 3, Combretastatin A-4, endostatin (collagen XVIII fragment), farnesyl transferase inhibitors, fibronectin fragment, GRO-beta, halofuginone, heparinases, heparin hexasaccharide fragment, HMV833, human chorionic gonadotropin (hCG), IM-862, interferon alpha, interferon beta, interferon gamma, interferon inducible protein 10 (IP-10), interleukin-12, kringle 5 (plasminogen fragment), marimastat, metalloproteinase inhibitors (e.g., TIMPs), 2-methoxyestradiol, MMI 270 (CGS 27023A), plasminogen activator inhibitor (PAI), platelet factor-4 (PF4), prinomastat, prolactin 16 kDa fragment, proliferin-related protein (PRP), PTK 787/ZK 222594, retinoids, solimastat, squalamine, SS3304, SU5416, SU6668, SU11248, tetrahydrocortisol-S, tetrathiomolybdate, thalidomide, thrombospondin-1 (TSP-1), TNP470, transforming growth factor beta (TGF-β), vasculostatin, vasostatin (calreticulin fragment), ZS6126, and ZD6474.

[0341] Heterologous cargo includes immunomodulatory agents that increase or decrease production of one or more cytokines, up- or down-regulate self-antigen presentation, mask MHC antigens, or promote the proliferation, differentiation, migration, or activation state of one or more types of immune cells. Examples of immunomodulatory agents include but are not limited to cytokines such as TGFβ, IFNα, IFNβ, IFNγ, IL-2, IL-4, IL-10; cytokine, chemokine, or receptor antagonists including antibodies, soluble receptors, and receptor-Fc fusions, such as those against BAFF, B7, CCR2, CCR5, CD2, CD3, CD4, CD6, CD7, CD8, CD11, CD14, CD15, CD17, CD18, CD20, CD23, CD28, CD40, CD40L, CD44, CD45, CD52, CD64, CD80, CD86, CD147, CD152, complement factors (C5, D), CTLA4, eotaxin, Fas, ICAM, IFNα, IFNβ, IFNγ, IFNAR, IgE, IL-1, IL-2, IL-2R, IL-4, IL-5R, IL-6, IL-8, IL-9, IL-12, IL-13, IL-13R1, IL-15, IL-18R, IL-23, integrins, LFA-1, LFA-3, MHC, selectins, TGFβ, TNFα, TNFβ, TNF-R1, T-cell receptor, including Enbrel® (etanercept), Humira® (adalimumab), and Remicade® (infliximab); heterologous anti-lymphocyte globulin; other immunomodulatory molecules such as anti-idiotypic antibodies for MHC binding peptides and MHC fragments.

[0342] Other heterologous cargo includes cytokines which include, but are not limited to lymphokines, monokines, and polypeptide hormones. Included among the cytokines are growth hormones such as human growth hormone, N-methionyl human growth hormone, and bovine growth hormone; parathyroid hormone; thyroxine; insulin; proinsulin; relaxin; prorelaxin; glycoprotein hormones such as follicle stimulating hormone (FSH), thyroid stimulating hormone (TSH), and luteinizing hormone (LH); hepatic growth factor; fibroblast growth factor; prolactin; placental lactogen; tumor necrosis factor-alpha and -beta; Müllerian-inhibiting substance; mouse gonadotropin-associated peptide; inhibin; activin; vascular endothelial growth factor; integrin; thrombopoietin (TPO); nerve growth factors such as NGF-beta; platelet-growth factor; transforming growth factors (TGFs) such as TGF-alpha and TGF-beta; insulin-like growth factor-I and -II; erythropoietin (EPO); osteoinductive factors; interferons such as interferon-alpha,-beta, and -gamma; colony stimulating factors (CSFs) such as macrophage-CSF (M-CSF); granulocyte-macrophage-CSF (GM-CSF); and granulocyte-CSF (G-CSF); interleukins (ILs) such as IL-1, IL-1alpha, IL-2, IL-3, IL-4, IL-5, IL-6, IL-7, IL-8, IL-9, IL-10, IL-11, IL-12; IL-15, a tumor necrosis factor such as TNF-alpha or TNF-beta; and other polypeptide factors including LIF and kit ligand (KL).

[0343] Other exemplary heterologous cargo includes cytokines and other agents that stimulate cells of the immune system and enhance desired effector function. For example, agents that stimulate NK cells include IL-2; agents that stimulate macrophages include but are not limited to C5a, formyl peptides such as N-formyl-methionyl-leucyl-phenylalanine. Heterologous cargo includes agents that stimulate neutrophils, such as, for example, G-CSF and GM-CSF. Additional agents include, but are not limited to, interferon gamma, IL-3 and IL-7.

[0344] In all instances, the cargo includes peptides, small peptides, polypeptides and proteins, nucleic acid encoding the proteins, including various forms of RNA, such as mRNA. The nucleic acids can be operably linked to regulatory elements that are recognized in the particular subject, such as a mammal, in which they are to be delivered.

| Target | | Exemplary route of |
|---|---|---|
| organ/tissue | Exemplary indication | administration |
| Lung | Cystic Fibrosis | Inhalation |
| Lung | Cystic Fibrosis | Inhalation |
| Lung | Idiopathic Pulmonary Fibrosis | Inhalation |
| Lung | Primary Ciliary Dyskinesia | Inhalation |
| Lung | Pulmonary Arterial Hypertension | Inhalation |
| Liver | Inborn error of metabolism | Intravenous or direct |
| | | injection into the liver |
| Lung | Covid-19 (preventive or | Intranasal or Inhalation |
| | therapeutic) | |
| Lymphatic | Covid-19 (vaccine) | Intravenous or |
| | | intramuscular |
| Lung | Influenza (preventive or | Intranasal or |
| | therapeutic) | Inhalation |
| Lymphatic | Influenza (vaccine) | Intravenous or |
| | | intramuscular |
| Lymphatic | Viral pathogen | Intravenous or |
| | | intramuscular |
| Lymphatic | Bacterial pathogen | Intravenous or |
| | | intramuscular |

### 2. Genetic Engineering of Producer Cells

[0345] As shown herein, the endogenously loaded MEVs from Chlorella can be used for delivery to humans by any suitable route, including but not limited to intravenous, oral, topical, mucosal, intratracheal, inhalation, intranasal, and any other routes known to those of skill in the art for delivery of vehicles, such as lipid nanoparticles, vectors, therapeutic bacteria, and therapeutic viruses. Upon administration, the MEVs are taken up by cells. Any heterologous cargo suitable to be obtained in the producer cells can be loaded into the MEVs provided herein. The loaded heterologous cargo can be selected so that it only is expressed or produced in targeted cells. Transcription regulatory signals can be selected so that the encoded product is expressed in targeted cells. For example, for expression in the liver, the encoded product can be expressed under control of a liver-specific promoter, or the product can be targeted to a receptor or target expressed in targeted cells, such as in tumors or in the tumor microenvironment.

### 3. Isolation of MEVs

[0346] Methods for isolation are discussed in the sections above and detailed in the Examples.

### 4. Exemplary Heterologous Cargo and Exemplary Uses of the Endogenously Loaded MEVs

### a Heterologous Cargo

[0347] As described above, the MEVs are loaded with cargo that can be used for any purpose of interest, including any for which other delivery vehicles are used. These uses include delivery of mRNA, such as mRNA encoding therapeutic proteins, including enzymes, RNAi, such as siRNA, and anti-sense RNA, to silence genes, such as genes that suppress the immune system and tumor genes, such as oncogenes. The cargo also can include a therapeutic protein, enzymatic or non-enzymatic, such as a therapeutic antibody. Therapeutic antibodies, include, but are not limited to, anti-cancer antibodies, antibodies to treat autoimmune or inflammatory disease, antibodies to treat transplant rejection, antibodies to treat graft-versus-host-disease (GVHD), and antibodies to treat infectious diseases.

### 1) RNA Cargo and Nucleic Acid Cargo

### RNA Interference and Microalgae

[0348] The mechanism of RNA interference or RNAi originally was described as a process of sequence-specific silencing of gene expression in the nematode Caenorhabditis elegans (Fire et al. (1998) Nature 391 (6669): 806-11; Fire and Mello, 2006 Nobel Prize in Medicine awarded to Andrew Fire and Craig Mello). The process of small RNAs targeting (and silencing) messenger RNAs involves a particular RNAi machinery (including silencing factors, such as DICER and ARGONAUTE).

[0349] In the plant kingdom, RNAi is involved in antiviral defense mechanisms, and in defense mechanisms against phytopathogenic fungi and oomycetes. Small regulatory RNAs can be active in silencing genes inside bacterial cells, which lack the said RNAi machinery. The silencing activity of siRNA heterologous has been demonstrated to be interkingdom (see, e.g., PCT/EP2019/072169, published as International PCT publication No. WO2020/035619, which shows that siRNA against bacteria can protect plants against infection by the bacteria; PCT/EP2019/072170, published as International PCT publication No WO2020/035620; and Singla et al. (2019c) bioRxiv, doi: doi.org/10.1101/863902). International PCT publication No. WO 2022/053687 shows that Chlorella species can package bacterial-targeted siRNA. Chlorella naturally packages siRNAs into MEVs. This publication and related publications do not show that Chlorella and/or other microalgae can package larger molecules, such as mRNA, plasmids, and polypeptides, into MEVs, as shown and described herein. RNAi-mediated regulation of gene expression has been exploited for several years in the field of biotechnology to confer resistance to viruses (Baulcombe (2015) Current Opinion in Plant Biology 26:141-146). The interkingdom RNAi has been used to characterize the function of genes of eukaryotic pathogens/parasites as well as to induce protection against these organisms.

[0350] In Drosophila and Caenorhabditis, RNAi plays a role in antiviral defense by directly targeting viral RNAs via the small RNAs produced by the host in response to viruses. Plant EVs naturally loaded (loaded by the plant cells producing the EVs) with small RNAs, from human edible plants, can modify the composition of the human gut microbiota and oral microbiota by silencing the expression of specific genes in certain commensal bacteria (Teng et al. (2018) Cell Host & Microbes 24:637-652; Sundaram et al. (2019) iScience 21:308-327).

[0351] Small interfering RNAs (siRNAs) and microRNAs (miRNAs) are noncoding RNAs with important roles in gene regulation. They also serve as classes of therapeutic agents for the treatment of a wide range of disorders including cancers and infections. Clinical trials of siRNA- and miRNA-based drugs have been initiated. siRNAs and miRNAs share many similarities, both are short duplex RNA molecules that exert gene silencing effects at the post-transcriptional level by targeting messenger RNA (mRNA), yet their mechanisms of action and clinical applications are distinct. Major difference between siRNAs and miRNAs is that the former is highly specific with only one mRNA target, whereas the latter have multiple targets. The siRNAs and miRNAs have a role in gene regulation and serve as targets for drug discovery and development. Compared with conventional small therapeutic molecules, siRNAs and miRNAs offer the potential to be highly potent and able to act on “non-druggable” targets (for example, proteins which lack an enzymatic function); RNAi can be designed to target and/or affect expression of any gene of interest.

[0352] RNAi is a conserved gene regulatory mechanism present in all living cells, by which small RNA molecules are involved in sequence-specific suppression of gene expression. The core mechanism of silencing involves the recognition and processing of double-stranded RNAs (dsRNAs) by the RNAse III enzyme Dicer (or Dicer-like) leading to the production of double-stranded short interfering RNA (siRNA) of 20-25 base pairs in length. These siRNA molecules subsequently bind to a central component, the Argonaute protein, of the RNA Induced Silencing Complex (RISC), for post-transcriptional silencing of the complementary transcripts. Dicer-like (DCL) enzyme and Argonaute (AGO) protein are key elements of the RNAi machinery. The former is responsible for processing long double-stranded RNAs (dsRNAs) into mature small RNAs.

[0353] In higher plants, DCLs form a gene family being composed of two, four, or five members; for example, four Dicer-like proteins (DCL1-DCL4) with different roles occur in Arabidopsis thaliana (see, e.g., Liu et al. (2009). Dicer-like (DCL) proteins in plants. Functional & integrative genomics 9:277-286). AGO subfamily proteins are present in a wide range of organisms in varied gene copy numbers; in plants, the AGO family has expanded during evolution—e.g. there are 10 different AGOs in Arabidopsis thaliana (see, Fang et al. (2016). RNAi in Plants: An Argonaute-Centered View. The Plant cell 28:272-285). The RNAi machinery in Chlorella, is relatively simple, as the Chlorella genome contains single DCL and AGO proteins (Cerutti et al. (2011). RNA-mediated silencing in Algae: biological roles and tools for analysis of gene function. Eukaryotic cell, 10 (9), 1164-1172).

[0354] EP 3967746A1, also published as International PCT Publication No. WO 2020/035620, and its family of applications (entitled “Chlorella-Based Production of Extracellular Vesicle-Embedded Small RNAs for Prophylactic or Therapeutic Applications”), describes methods exploiting this pathway in Chlorella for producing anti-infectives, for plants, based on antimicrobial small RNAs encoded in and expressed in Chlorella cells. Chlorella cells naturally produce and release Extracellular Vesicle (EV)-embedded antimicrobial small RNAs, and the resulting EVs. These EVs are endogenously loaded with siRNA and can be exploited, for example for in EV-based anti-infective products. To exploit the RNA interference pathway, this family of applications describes transforming Chlorella cells with a siRNA or miRNA precursor, which is either long double-stranded RNAs (long dsRNAs) or long single-stranded RNAs (long ssRNAs), The long RNA is enzymatically processed into shorter RNA molecules in Chlorella cells. The precursor length is about 80 to 3000 base pairs or bases. Long dsRNA can be directly processed by the DCL enzyme encoded in the Chlorella genome. The long ssRNA must be converted into long dsRNA molecule, which is subsequently processed by the Chlorella DCL enzyme. The products of DCL enzyme are RNA duplexes produced from their respective long dsRNA precursors. The RNA duplex is a double-stranded structure, a first (sense) and a second (antisense) strand of at least 15 base pairs, where the antisense strand comprises a region of at least 15 contiguous nucleotides that are complementary to a transcript of the targeted gene. The RNA duplex undergoes maturation into a single-stranded molecule in the RISC complex of Chlorella cell and is loaded in the AGO protein and/or associated with other RNA-binding proteins. Thereby, the Chlorella cells can produce functional small interfering RNAs such as siRNAs or miRNAs. These small RNAs have a short size, which is generally between 15 and 30 base pairs or bases and are released into the extracellular medium or naturally embedded into extracellular vesicles at the surface of the Chlorella cells. It does not describe that larger molecules can be packaged into MEVs; it shows use of the Chlorella machinery for producing and packaging small RNA molecules.

[0355] The above-family of applications is directed to EV-embedded antimicrobial small RNAs; they do not describe using microalgae to produce EVs loaded with cargo other than small RNA molecules, which generally are no larger than about 50 base pairs or bases. In contrast, it is shown and described herein, that it is possible to exploit Chlorella EVs and load mRNA, particularly for translation in a host cell, proteins, peptides, editing complexes, and other endogenously produced molecules. As exemplified in the PCT publication, Chlorella cells are engineered by transforming them with an inverted repeat (coding for either long double-stranded RNAs (long dsRNAs) or long single-stranded RNAs (long ssRNAs), bearing sequence homology with key virulence factors from pathogenic bacteria.

mRNA and larger RNA and larger products can be packaged into MEVs

[0356] In contrast the disclosures discussed above in which siRNA relying on endogenous machinery in the microalgae, it is described and shown herein that the MEVs can be endogenously loaded with mRNA, which is much larger than RNAi. mRNA generally is larger, typically more than 300 bases, and mRNA encodes proteins. In nature, mRNA is for translation into proteins; mRNA is not, itself, the therapeutic product. For delivery herein, the mRNA can be the therapeutic product that is delivered upon administration, such as delivery of mRNA as a vaccine where the mRNA is translated by the host to whom the vaccine is administered. For delivery of mRNA, the microalgae can be transformed, such as with an episomal plasmid encoding the mRNA, or alternatively, genome-modified, where the encoded mRNA contains regulatory signals. mRNA and RNAi fundamentally differ in the mechanism of action used to elicit the appearance or disappearance of specific protein products: while the immediate, direct product of a mRNA is the appearance of a protein, the immediate direct product of an RNAi is the disappearance, via inhibition, of an mRNA.

[0357] In has been reported that the amount of mRNA inside mammalian EVs largely reflects the cellular abundance of mRNAs or lncRNAs. The mRNA contents of mammalian EVs is not a mere reflection of the cellular transcriptome. mRNA contained in EVs tends to be richer in GC and are also enriched in motifs that can bind certain RBP (RNA binding proteins) that contribute to the sorting of mRNA. The nucleic acid, such as plasmid encoding the mRNA can be designed so that the mRNA is produced in abundance.

[0358] mRNA packaging in MEVs can be accomplished by operatively linking the nucleic acid encoding the mRNA of interest to a eukaryotic promoter, generally a strong promoter, including plant promoters, algae and microalgae promoters, or virus promoters, and optionally other regulatory sequences, such enhancers, in a plasmid that is introduced into the microalgae cells, such as by methods exemplified herein or any other methods known to those of skill in the art. The mRNA then is expressed at high levels and is packaged in the MEVs produced by the microalgae cells for delivery by the MEVs to host cells upon administration.

Exemplary Promoters for expression of encoded nucleic acid

[0359] Exemplary promoters for expression of encoded mRNA and proteins in microalgae, include plant promoters. Sequence of plant promoters are well known (see, e.g., Shahmuradov et al. (2003) PlantProm: a database of plant promoter sequences Nucleic Acids Res. 31:114-117, URL: softberry.com/plantprom2016/). The following table includes a list of exemplary plant promoters; sequences of exemplary promoters from the table are set forth in SEQ ID NOs: 86-206 and include any having at least 95%, 96%, 97%, 98%, 99% or more sequence identity therewith and retaining the ability to interact with a RNA polymerase II or III to initiate transcription.

| Promoter name | Origin | Reference |
|---|---|---|
| SVFLt | Peanut chlorotic streak | Maiti I B and Shepherd R J (1998) Isolation and |
| | caulimovirus (PC1SV) | expression analysis of peanut chlorotic streak |
| | | caulimovirus (PCISV) full-length transcript |
| | | (FLt) promoter in transgenic plants. Biochem. |
| | | Biophys. Res. Commun. 244(2): 440-444; see |
| | | GenBank: KM407007.1 |
| Enhanced 35S (E35S) | Cauliflower mosaic | Li Z, Jayasankar S and Gray D J 2001 |
| | virus 35S | Expression of a bifunctional green fluorescent |
| | | protein (GFP) fusion marker under the control of |
| | | three constitutive promoters and enhanced |
| | | derivatives in transgenic grape (Vitis vinifera). |
| | | Plant Sci. 160(5): 877-887; see also Kay et al., |
| | | Science 236(4806): 1299-1302 |
| Sgt | Figwort mosaic virus | Bhattacharyya S, Dey N and Maiti I B 2002 |
| | (FMV) | Analysis of cis-sequence of subgenomic |
| | | transcript promoter from the Figwort mosaic |
| | | virus and comparison of promoter activity with |
| | | the cauliflower mosaic virus promoters in |
| | | monocot and dicot cells. Virus Res. 90(1-2): 47- |
| | | 62; see also GenBank: X06166.1 |
| CsVMV | Cassava vein mosaic | Seemanpillai M, Dry I, Randles J and Rezaian A |
| | virus (CsVMV) | 2003 Transcriptional silencing of geminiviral |
| | | promoter-driven transgenes following |
| | | homologous virus infection. Mol. Plant |
| | | Microbe. Interact. 16(5): 429-438; see also |
| | | GenBank: U59751.1; see also Verdaguer et al., |
| | | (1996) Isolation and expression in transgenic |
| | | tobacco and rice plants, of the cassava vein |
| | | mosaic virus (CVMV) promoter. Plant Mol. |
| | | Biol. 31: 1129-1139 |
| sgRNA β 1, β 2 and γ | Barley stripe mosaic | Johnson J A, Bragg J N, Lawrence D M and |
| | virus (BSMV) | Jackson A O 2003 Sequence elements |
| | | controlling expression of Barley stripe mosaic |
| | | virus subgenomic RNAs in vivo. Virology 313 |
| | | 66-80; see also β 1, β 2: GenBank Accn. No.: |
| | | KY615802.1; see also γ: GenBank Accn. No.: |
| | | M16576.1 |
| SV (antisense) | Peanut chlorotic streak | Bhattacharyya S, Pattanaik S and Maiti I B 2003 |
| | caulimovirus (PC1SV) | Intron-mediated enhancement of gene |
| | | expression in transgenic plants using chimeric |
| | | constructs composed of the Peanut chlorotic |
| | | streak virus (PCISV) promoter-leader and the |
| | | antisense orientation of PC1SV ORF VII (p7R). |
| | | Planta 218 115-24; see also GenBank: U13988.1; |
| 35S | Cauliflower mosaic | Yang I C, Iommarini J P, Becker D K, Hafner G J, |
| | virus 35S | Dale J L and Harding R M 2003 A promoter |
| | | derived from taro bacilliform badnavirus drives |
| | | strong expression in transgenic banana and |
| | | tobacco plants. Plant Cell Rep. 21 1199-1206; |
| | | see also GenBank: V00141.1; see also Fang et |
| | | al., (1989) Multiple cis regulatory elements for |
| | | maximal expression of the cauliflower mosaic |
| | | virus 35S promoter in transgenic plants. The |
| | | Plant Cell 1(1): 141-150 |
| CLCuBuV | Cotton leaf curl | Obertello M, Santi C, Sy M O, Laplaze L, Auguy |
| Rep/CLCuBuV CP | Burewala virus | F, Bogusz D and Franche C (2005) Comparison |
| | (CLCuBuV) | of four constitutive promoters for the expression |
| | | of transgenes in the tropical nitrogen-fixing tree |
| | | Allocasuarina verticillata. Plant Cell Rep. |
| | | 24(9): 540-548; see also U.S. Pat. No. |
| | | US06610907; see also Khan et al., (2015) |
| | | Functional Characterization of a Strong Bi- |
| | | directional Constitutive Plant Promoter Isolated |
| | | from Cotton Leaf Curl Burewala Virus. PLOS |
| | | ONE. 10(3): e0121656 |
| FMV | Figwort mosaic virus | Govindarajulu M, Elmore J M, Fester T and |
| | (FMV) | Taylor C G 2008 Evaluation of constitutive viral |
| | | promoters in transgenic soybean roots and |
| | | nodules. Mol. Plant Microbe Interact. |
| | | 21(8): 1027-1035; see also GenBank: X06166.1; |
| | | see also US patent pub. No. 2008/0227966 |
| Pptcal | Cytomegalovirus | Sakaue K, Harada H and Matsuda Y 2008 |
| | (CMV) | Development of gene expression system in a |
| | | marine diatom using viral promoters of a wide |
| | | variety of origin. Physiol. Plant. 133(1): 59-67; |
| | | see also GenBank: OU594942.1 |
| e35S-4ocs | Cauliflower mosaic | Govindarajulu M, Elmore J M, Fester T and |
| | virus 35S | Taylor C G 2008 Evaluation of constitutive viral |
| | | promoters in transgenic soybean roots and |
| | | nodules. Mol. Plant Microbe Interact. |
| | | 21(8): 1027-1035; see also U.S. Patent Pub No. |
| | | 2006/0031966 |
| AV3 | Ageratum yellow vein | Wang P, Du Y, Zhao X, Miao Y and Song C P |
| | virus (AYVV) | 2013 The MPK6-ERF6-ROS-responsive cis- |
| | | acting Element7/GCC box complex modulates |
| | | oxidative gene transcription and the oxidative |
| | | response in Arabidopsis. Plant Physiol. |
| | | 161: 1392-1408; see also U.S. Patent Pub No. |
| | | US 2011/0053258 |
| TLCV | Tomato leaf curl virus | Khan Z A, Abdin M Z and Khan J A 2015 |
| | | Functional characterization of a strong bi- |
| | | directional constitutive plant promoter isolated |
| | | from cotton leaf curl Burewala virus. PLoS One |
| | | 10(3): e0121656; see also U.S. Patent Pub No. |
| | | 2014/0227230 |
| AMT-1 | Chlorella virus NC-1A | U.S. Pat. No. US6673537B1 |
| AMT-2 | Chlorella virus XZ-6E | U.S. Pat. No. US6673537B1 |
| CMT-1 | Chlorella virus IL-3A | U.S. Pat. No. US6673537B1 |
| UBQ1/UBQ2 | Oryza sativa | Wang J and Oard J H 2003 Rice ubiquitin |
| (RUBQ1/2) | | promoters: deletion analysis and potential |
| | | usefulness in plant transformation systems: |
| | | Genetic transformation and hybridization. Plant |
| | | Cell Rep. 22(2): 129-34; see also Wang, Jianlin, |
| | | Junda Jiang, and James H. Oard 2000, |
| | | “Structure, expression and promoter activity of two |
| | | polyubiquitin genes from rice (Oryza sativa L.).” |
| | | Plant Science 156(2): 201-211; see also |
| | | Accession Nos. AF184280.1 |
| UBQ1 | Arabidopsis | Obertello M, Santi C, Sy M O, Laplaze L, Auguy |
| | | F, Bogusz D and Franche C 2005 Comparison of |
| | | four constitutive promoters for the expression of |
| | | transgenes in the tropical nitrogen-fixing tree |
| | | Allocasuarina verticillata. Plant Cell Rep. |
| | | 24(9): 540-548; see also NCBI Reference |
| | | Sequence: NC_003074.8 |
| VR-ACS1 | Vigna radiata | Cazzonelli C I, McCallum E J, Lee R and Botella |
| | | J R 2005 Characterization of a strong constitutive |
| | | mung bean (Vigna radiata L) promoter with a |
| | | complex mode of regulation in planta. |
| | | Transgenic Res. 14: 941-967; see also NCBI |
| | | Reference Sequence: NC_028357 |
| Ubi | Glycine max | Hernandez-Garcia C M, Martinelli A P, Bouchard |
| | | R A and Finer J J 2009 A soybean (Glycine max) |
| | | polyubiquitin promoter gives strong constitutive |
| | | expression in transgenic soybean. Plant Cell |
| | | Rep. 28(5): 837-849; see also Chiera, Joseph M., |
| | | et al. “Isolation of two highly active soybean |
| | | (Glycine max (L.) Merr.) promoters and their |
| | | characterization using a new automated image |
| | | collection and analysis system.” Plant Cell |
| | | Reports 26(9): 1501-1509; see also NCBI ref. |
| | | seq. NC 038256.2 |
| Ubi1 | Zea mays | Bhattacharyya J, Chowdhury A H, Ray S, Jha |
| | | J K, Das S, Gayen S, Chakraborty A, Mitra J, |
| | | Maiti M K, Basu A and Sen S K 2011 Native |
| | | polyubiquitin promoter of rice provides |
| | | increased constitutive expression in stable |
| | | transgenic rice plants Plant Cell Rep. 31(2): |
| | | 271-279 |
| Ubi1 | Oryza sativa | Bhattacharyya J, Chowdhury A H, Ray S, Jha |
| | | J K, Das S, Gayen S, Chakraborty A, Mitra J, |
| | | Maiti M K, Basu A and Sen S K 2011 Native |
| | | polyubiquitin promoter of rice provides |
| | | increased constitutive expression in stable |
| | | transgenic rice plants Plant Cell Rep. 31(2): 271- |
| | | 279; see also NCBI Accession No. AY785814 |
| GAI | Oryza sativa | Bhattacharyya J, Chowdhury A H, Ray S, Jha |
| | | J K, Das S, Gayen S, Chakraborty A, Mitra J, |
| | | Maiti M K, Basu A and Sen S K 2011 Native |
| | | polyubiquitin promoter of rice provides |
| | | increased constitutive expression in stable |
| | | transgenic rice plants Plant Cell Rep. 31(2): 271- |
| | | 279; see also U.S. Pat. No. 11,220,694 |
| Ubi1/Ubi2 | Panicum virgatum | Mann D G, King Z R, Liu W, Joyce B L, |
| | | Percifield R J, Hawkins J S, LaFayette P R, Artelt |
| | | B J, Burris J N, Mazarei M, Bennetzen J L, Parrott |
| | | W A and Stewart C N 2011 Switchgrass |
| | | (Panicum virgatum L) polyubiquitin gene |
| | | (PvUbi1 and PvUbi2) promoters for use in plant |
| | | transformation. BMC Biotechnol. 11(1): 74; see |
| | | also GenBank No.: HM209467.1; see also U.S. |
| | | Patent pub. No 2011/0023183 |
| uceApro2 | Gossypium | Viana A A, Fragoso R R, Guimaraes L M, Pontes |
| | | N, Oliveira-Neto O B, Artico S et al 2011 |
| | | Isolation and functional characterization of a |
| | | cotton ubiquitination-related promoter and |
| | | 5′UTR that drives high levels of expression in |
| | | root and flower tissues. BMC Biotechnol. |
| | | 11: 115; see also US Patent Pub. No. |
| | | 2017/0029843 |
| SUI1 | Ananas comosus | Koia J, Moyle R, Hendry C, Lim L and Botella |
| | | JR 2013 Pineapple translation factor SUI1 and |
| | | ribosomal protein L36 promoters drive |
| | | constitutive transgene expression patterns in |
| | | Arabidopsis thaliana. Plant Mol. Biol. 81: 327- |
| | | 336 |
| L36 | Ananas comosus | Koia J, Moyle R, Hendry C, Lim L and Botella |
| | | JR 2013 Pineapple translation factor SUI1 and |
| | | ribosomal protein L36 promoters drive |
| | | constitutive transgene expression patterns in |
| | | Arabidopsis thaliana. Plant Mol. Biol. 81: 327- |
| | | 336 |
| EF1α | Marchantia | Althoff F, Kopischke S, Zobell O, Ide K, |
| | polymorpha | Ishizaki K, Kohchi T and Zachgo S 2014 |
| | | Comparison of the MpEF1alpha and CaMV35 |
| | | promoters for application in Marchantia |
| | | polymorpha overexpression studies. Transgenic |
| | | Res. 23(2): 235-244; see also Aida et a. 2005, |
| | | Efficient Transgene Expression in |
| | | Chrysanthemum, Chrysanthemum morifolium |
| | | Ramat., with the Promoter of a Gene for |
| | | Tobacco Elongation Factor 1 α Protein; see also |
| | | GenBank: AB630337.1 |
| EF1α/UBI10/GLU1 | Brachypodium | Coussens G, Aesaert S, Verelst W, |
| | distachyon | Demeulenaere M, De Buck S, Njuguna E, Inze |
| | | D and Van Lijsebettens M 2012 Brachypodium |
| | | distachyon promoters as efficient building |
| | | blocks for transgenic research in maize. J. Exp. |
| | | Bot. 63(11): 4263-4273 |
| Con1 | Oryza sativa | Li J, Xu R F, Qin R Y, Ma H, Li H, Zhang Y P, Li |
| | | L, Wei P C and Yang J B 2014 Isolation and |
| | | functional characterization of a novel rice |
| | | constitutive promoter. Plant Cell Rep. |
| | | 33(10): 1651-60 |
| TCTP | Arabidopsis | Han Y J, Kim Y M, Hwang O J and Kim J I 2015 |
| | | Characterization of a small constitutive |
| | | promoter from Arabidopsis translationally |
| | | controlled tumor protein (AtTCTP) gene for |
| | | plant transformation. Plant Cell Rep. 34(2): 265- |
| | | 275 |
| RD29A, RD29B | Arabidopsis | Bihmidine S, Lin J, Stone J M, Awada T, Specht |
| | | J E and Clemente T E 2013 Activity of the |
| | | Arabidopsis RD29A and RD29B promoter |
| | | elements in soybean under water stress. Planta |
| | | 237(1): 55-64; see also GenBank accession |
| | | number D13044.1 |
| UEP | Jatropha curcas | Tao Y B, He L L, Niu L J and Xu Z F 2015 |
| | | Isolation and characterization of an ubiquitin |
| | | extension protein gene (JcUEP) promoter from |
| | | Jatropha curcas. Planta 241(4): 823-836; see |
| | | also GenBank: KJ202645 |
| KST1 | Solanum tuberosum | Kelly G, Lugassi N, Belausov E, Wolf D, |
| | | Khamaisi B, Brandsma D, Kottapalli J, Fidel L, |
| | | Ben-Zvi B, Egbaria A, Acheampong A K, Zheng |
| | | C, Or E, Distelfeld A, David-Schwartz R, Carmi |
| | | N and Granot D 2017 The Solanum tuberosum |
| | | KST1 partial promoter as a tool for guard cell |
| | | expression in multiple plant species. J. Exp. Bot. |
| | | 68(11): 2885-2897; see also NCBI: AJ242852.1 |
| CsCYP, CsGAPC2, | Citrus sinensis | Erpen L, Tavano E C R, Harakava R, Dutt M, |
| CsEF1 | | Grosser J W, Piedade S M S and Moura o Filho |
| | | F A A 2018 Isolation, characterization and |
| | | evaluation of three Citrus sinensis-derived |
| | | constitutive gene promoters. Plant Cell Rep. |
| | | 37(8): 1113-1125; see also GenBank: |
| | | MN097548.1 (Citrus sinensis isolate CsMDx8 |
| | | EF1 gene, promoter region) |
| AtSCPL30 | Arabidopsis | Jiang P, Zhang K, Ding Z, He Q, Li W, Zhu S |
| | | and Li K 2018 Characterization of a strong and |
| | | constitutive promoter from the Arabidopsis |
| | | serine carboxypeptidase-like gene AtSCPL30 as |
| | | a potential tool for crop transgenic breeding. |
| | | BMC Biotech. 18: 59 |
| CsGAPC2, CsEF1 | Citrus sinensis | Erpen-Dalla Corte L, Mendes B M J, Mourao |
| | | Filho F A A, Grosser J W and Dutt M 2020 |
| | | Functional characterization of full-length and 50 |
| | | deletion fragments of Citrus sinensis-derived |
| | | constitutive promoters in Nicotiana |
| | | benthamiana. In Vitro Cell. Dev. Biol. Plant 56 |
| | | 280-289: see also GenBank: MN097541.1, |
| | | MN097542.1, MN097543.1 |
| 16R | Solanum tuberosum | Sztafrowski, D., Aksamit-Stachurska, A., |
| | | Kostyn, K., Mackiewicz, P., & Łukaszewicz, M. |
| | | (2017). Electromagnetic Field Seems to Not |
| | | Influence Transcription via CTCT Motif in |
| | | Three Plant Promoters. Frontiers in Plant |
| | | Science, 8, 178. |
| | | doi.org/10.3389/fpls.2017.00178; see also |
| | | GenBank Accn. No. AY070220.1 |
| 20R | Solanum tuberosum | Sztafrowski, D., Aksamit-Stachurska, A., |
| | | Kostyn, K., Mackiewicz, P., & Łukaszewicz, M. |
| | | (2017). Electromagnetic Field Seems to Not |
| | | Influence Transcription via CTCT Motif in |
| | | Three Plant Promoters. Frontiers in Plant |
| | | Science, 8, 178. |
| | | doi.org/10.3389/fpls.2017.00178; GenBank acc. |
| | | no. AY518222 |
| 5UGT | Solanum tuberosum | Sztafrowski, D., Aksamit-Stachurska, A., |
| | | Kostyn, K., Mackiewicz, P., & Łukaszewicz, M. |
| | | (2017). Electromagnetic Field Seems to Not |
| | | Influence Transcription via CTCT Motif in |
| | | Three Plant Promoters. Frontiers in Plant |
| | | Science, 8, 178. |
| | | doi.org/10.3389/fpls.2017.00178; see also |
| | | GenBank acc. no. AY033489 (mRNA |
| | | sequence); see also GenBank acc. no. |
| | | AY177376.1 (includes gene, promoter region |
| | | and partial CDS). |
| HSP90 promoter | Nannochloropsis | Ramarajan M, Fabris M, Abbriano R M, Pernice |
| (Nga00934) | gaditana | M, Ralph P J (2019) Novel endogenous |
| | | promoters for genetic engineering of the marine |
| | | microalga Nannochloropsis gaditana CCMP526, |
| | | Algal Research 44, 101708; See also NCBI No. |
| | | AZIL01000126.1 |
| EPPSII promoter | Nannochloropsis | Ramarajan M, Fabris M, Abbriano R M, Pernice |
| (Nga02101) | gaditana | M, Ralph P J (2019) Novel endogenous |
| | | promoters for genetic engineering of the marine |
| | | microalga Nannochloropsis gaditana CCMP526, |
| | | Algal Research 44, 101708 |
| ATPase promoter | Nannochloropsis | Ramarajan M, Fabris M, Abbriano RM, Pernice |
| (Nga06354.1) | gaditana | M, Ralph PJ (2019) Novel endogenous |
| | | promoters for genetic engineering of the marine |
| | | microalga Nannochloropsis gaditana CCMP526, |
| | | Algal Research 44, 101708 |
| TCT; RPL24; 4AIII; | Nannochloropsis | Ajjawi, I., Verruto, J., Aqui, M. et al. (2017) |
| EIF3 | gaditana | Lipid production in Nannochloropsis gaditana is |
| | | doubled by decreasing expression of a single |
| | | transcriptional regulator. Nat Biotechnol 35, |
| | | 647-652 |
| EF; TUB; NR | Nannochloropsis | de Grahl, I., Rout, S. S., Maple-Grødem, J., & |
| | oceanica | Reumann, S. (2020). Development of a |
| | | constitutive and an auto-inducible high-yield |
| | | expression system for recombinant protein |
| | | production in the microalga Nannochloropsis |
| | | oceanica. Applied microbiology and |
| | | biotechnology, 104(20), 8747-8760. |
| | | doi.org/10.1007/s00253-020-10789-4 |
| AcRbcS | Ankistrodesmus | Thanh, T., Chi, V. T. Q., Omar, H., Abdullah, |
| | convolutus | M. P., and Napis, S. (2012). Sequence analysis |
| | | and potentials of the native RbcS promoter in |
| | | the development of an alternative eukaryotic |
| | | expression system using green microalga |
| | | Ankistrodesmus convolutus. Int. J. Mol. Sci. 13, |
| | | 2676-2691 |
| HSP70A | Chlamydomonas | Schroda, M., Blöcker, D., & Beck, C. F. (2000). |
| | reinhardtii | The HSP70A promoter as a tool for the |
| | | improved expression of transgenes in |
| | | Chlamydomonas. Plant J. 21(2), 121-131 |
| ARG7 | Chlamydomonas | Specht, E. A., Nour-eldin, H. H., Hoang, K. T. |
| | reinhardtii | D., and Mayfield, S. P. (2015). An improved |
| | | ARS2-derived nuclear reporter enhances the |
| | | efficiency and ease of genetic engineering in |
| | | Chlamydomonas. Biotechnol. J. 10, 473-479 |
| AR; METE; NIT1; A*R; | Chlamydomonas | Crozet, P., Navarro, F. J., Willmund, F., |
| PSAD; β-TUB2; VIPP2 | reinhardtii | Mehrshahi, P., Bakowski, K., Jonathan, K., et al. |
| | | (2018). Birth of a photosynthetic chassis: a |
| | | MoClo toolkit enabling synthetic biology in the |
| | | microalga Chlamydomonas reinhardtii. ACS |
| | | Synth. Biol. 7, 2074-2086 |
| GPDH3 | Chlamydomonas | Beltran-Aguilar, A. G., Peraza-Echeverria, S., |
| | reinhardtii | López-Ochoa, L. A., Borges-Argáez, I. C., & |
| | | Herrera-Valencia, V. A. (2019). A novel salt- |
| | | inducible CrGPDH3 promoter of the microalga |
| | | Chlamydomonas reinhardtii for transgene |
| | | overexpression. Applied microbiology and |
| | | biotechnology, 103(8), 3487-3499 |
| CvNDI1 and CvNDI2 | Chlorella vulgaris | Shin, J. H., Choi, J., Jeon, J., Kumar, M., Lee, J., |
| | | Jeong, W. J., & Kim, S. R. (2020). The |
| | | establishment of new protein expression system |
| | | using N starvation inducible promoters in |
| | | Chlorella. Scientific reports, 10(1), 12713 |
| psaD | Chlorella vulgaris | Kim, J., Liu, L., Hu, Z., and Jin, E. (2018). |
| | | Identification and functional analysis of the |
| | | psaD promoter of Chlorella vulgaris using |
| | | heterologous model strains. Int. J. Mol. Sci. |
| | | 19: 1969 |
| α-tubulin | Chlorella vulgaris | Fernández-Rodríguez R, Garro-Monge G, |
| | | Guerrero-Barrantes M, Gómez-Espinoza O. |
| | | (2020) Alpha-tubulin promoter from Chlorella |
| | | vulgaris allows genetic transformation of green |
| | | coccoid microalga. Tecnología en Marcha. 33- |
| | | 2: 27-36 |
| Rol A/B/C | Agrobacterium | Schmulling T, Schell J and Spena A 1989 |
| | rhizogens | Promoters of the rolA B and C genes of |
| | | Agrobacterium rhizogenes are differentially |
| | | regulated in transgenic plants. Plant Cell 1: 665- |
| | | 670; see also GenBank No.: X64255.1 |
| Ocs | Agrobacterium | Zhou J, Yang Y, Wang X, Yu F, Yu C, Chen J, |
| | rhizogens | Cheng Y, Yan C and Chen J 2013 Enhanced |
| | | transgene expression in rice following selection |
| | | controlled by weak promoters. BMC Biotechnol. |
| | | 27 13-29; see also Bouchez et al 1989, The ocs- |
| | | element is a component of the promoters of |
| | | several T-DNA and plant viral genes |
| Mas | Agrobacterium | Zhou J, Yang Y, Wang X, Yu F, Yu C, Chen J, |
| | rhizogens | Cheng Y, Yan C and Chen J 2013 Enhanced |
| | | transgene expression in rice following selection |
| | | controlled by weak promoters. BMC Biotechnol. |
| | | 27 13-29 |
| Nos | Agrobacterium | Zhou J, Yang Y, Wang X, Yu F, Yu C, Chen J, |
| | rhizogens | Cheng Y, Yan C and Chen J 2013 Enhanced |
| | | transgene expression in rice following selection |
| | | controlled by weak promoters. BMC Biotechnol. |
| | | 27 13-29 |
| pCL | synthetic | Li F, Han Y, Feng Y, Xing S, Zhao M, Chen Y |
| | | and Wang W 2013 Expression of wheat |
| | | expansin driven by the RD29 promoter in |
| | | tobacco confers water-stress tolerance without |
| | | impacting growth and development. J. |
| | | Biotechnol. 163 281-291 |
| Sab/sba | synthetic | Li F, Han Y, Feng Y, Xing S, Zhao M, Chen Y |
| | | and Wang W 2013 Expression of wheat |
| | | expansin driven by the RD29 promoter in |
| | | tobacco confers water-stress tolerance without |
| | | impacting growth and development. J. |
| | | Biotechnol. 163 281-291 |
| 4 x CCTC | synthetic | Lota F, Wegmu\ddot{ } ller S, Buer B, Sato S, |
| | | Bra\ddot{ }utigam A, Hanf B and Bucher M 2013 The |
| | | cis-acting CTTC-P1BS module is indicative for |
| | | gene function of LjVTI12 a Qb-SNARE protein |
| | | gene that is required for arbuscule formation in |
| | | Lotus japonicas. Plant J. 74 280-293 |
| 4xRE/B4REA | synthetic | Liu W, Mazarei M, Peng Y, Fethe M H, Rudis |
| | | M R, Lin J, Millwood R J, Arelli P R and Stewart |
| | | C N 2014 Computational discovery of soybean |
| | | promoter cis-regulatory elements for the |
| | | construction of soybean cyst nematode-inducible |
| | | synthetic promoters. Plant Biotechnol. J. 12 |
| | | 1015-1026 |
| FsFfCBD | synthetic | Patro S, Maiti I B and Dey N 2013 Development |
| | | of an efficient bi-directional promoter with |
| | | tripartite enhancer employing three viral |
| | | promoters. J. Biotechnol. 163 311-317 |
| 4 × GCC | synthetic | Van der Does D, Leon-Reyes A, Koornneef A, |
| | | Van Verk M C, Rodenburg N, Pauwels L, |
| | | Goossens A, Korbes A P, Memelink J, Ritsema |
| | | T, Van Wees S C and Pieterse C M 2013 |
| | | Salicylic acid suppresses jasmonic acid |
| | | signaling downstream of SCFCOI1-JAZ by |
| | | targeting GCC promoter motifs via transcription |
| | | factor ORA59. Plant Cell 25 744-761 |
| 4 x ROSE1~7 | synthetic | Wang P, Du Y, Zhao X, Miao Y and Song C P |
| | | 2013 The MPK6-ERF6-ROS-responsive cis- |
| | | acting Element7/GCC box complex modulates |
| | | oxidative gene transcription and the oxidative |
| | | response in Arabidopsis. Plant Physiol. 161 |
| | | 1392-1408 |
| FSgt-PFlt; MSgt-PFlt; | synthetic | Acharya S, Ranjan R, Pattanaik S, Maiti I B and |
| PFlt-UAS-2X | | Dey N 2014 Efficient chimeric plant promoters |
| | | derived from plant infecting viral promoter |
| | | sequences. Planta 239 381-396 |
| 4 x RSRE | synthetic | Benn G, Wang C Q, Hicks D R, Stein J, Guthrie |
| | | C and Dehesh K 2014 A key general stress |
| | | response motif is regulated non-uniformly by |
| | | CAMTA transcription factors. Plant J. 80 82-92 |
| p35S-PCHS-Ω; p35S-Ω; | synthetic | Du L, Lou Q, Zhang X, Jiao S, Liu Y and Wang |
| LCHS-Ω; pOCS-PCHS- | | Y 2014 Construction of flower-specific chimeric |
| Ω; pOCS-LCHS-Ω | | promoters and analysis of their activities in |
| | | transgenic Torenia. Plant Mol. Biol. Rep. 32 |
| | | 234-245 |
| CL | synthetic | Li M, Xie C, Song B, Ou Y, Lin Y, Liu X, |
| | | Zhang H and Liu J 2015 Construction of |
| | | efficient tuber-specific and cold-inducible |
| | | promoters in potato. Plant Sci. 235: 14-24 |
| MAMP-responsive | synthetic | Kanofsky K, Lehmeyer M, Schulze J and Hehl |
| synthetic promoter | | R 2016 Analysis of microbe-associated |
| | | molecular pattern-responsive synthetic |
| | | promoters with the parsley protoplast system. |
| | | Methods Mol. Biol. 1482 163-174 |
| P_DRE::35S | synthetic | Gerasymenko I M and Sheludko Y V 2017 |
| | | Synthetic cold-inducible promoter enhances |
| | | recombinant protein accumulation during |
| | | Agrobacterium-mediated transient expression in |
| | | Nicotiana excelsior at chilling temperatures |
| | | Biotechnol. Lett. 39 1059-1067 |
| SynP16 | synthetic | Jameel, A., Noman, M., Liu, W., Ahmad, N., |
| | | Wang, F., Li, X., & Li, H. (2020). Tinkering Cis |
| | | Motifs Jigsaw Puzzle Led to Root-Specific |
| | | Drought-Inducible Novel Synthetic Promoters. |
| | | International Journal of Molecular Sciences, |
| | | 21(4), 1357 |
| AβSAP(i) | synthetic | Einhaus, A., Baier, T., Rosenstengel, M., |
| | | Freudenberg, R. A., & Kruse, O. (2021). |
| | | Rational Promoter Engineering Enables Robust |
| | | Terpene Production in Microalgae. ACS |
| | | synthetic biology, 10(4), 847-856. |
| | | doi.org/10.1021/acssynbio.0c00632 |

[0360] Additional exemplary promoters include, but are not limited to:

| EF2 (elongation factor 2) | Phaeordactium tricornutum |
|---|---|
| Histone 4 | Penicillium funiculosum |
| Lhcf.1 (Light-harvesting complex protein) | Phaeodactium tricornutum |
| Ubi.U4 | Nicotiana tabacum |
| MAS Mannopine Synthase | Agrobacterium tumefaciens |
| CAM 35S | Cauliflower mosaic virus |
| PAR (Pseudoautosomal region) | Arabidopsis thaliana |
| Cv PAS D (Photosystem protein D) | Chlorella vulgaris |
| CMV | Cytomegalovirus |
| CMV + enhancer | Cytomegalovirus |
| SV40 | Simian virus 40 |

Regulatory sequences and binding sites for control of translation in genetically-modified microalgae

[0361] Regulatory signals and binding sites for controlling translation are well known. The following is an overview and description of signals and sites in mRNA for controlling translation, including sites that can be modified or deleted so that the mRNA is not translated in the microalgae, but is delivered by MEVs (for a review, see, Fátima Gebauer et al. (2004) Nature Reviews Molecular Cell Biology 5:827-835).

[0362] Structural features and regulatory sequences within the mRNA include: the canonical end modifications of mRNA molecules—the cap structure and the poly(a) tail—which are required for translation initiation; internal ribosome-entry sequences (IRESs), which mediate cap-independent translation initiation; upstream open reading frames (uORFs and sORFs), which normally reduce translation from the main ORF; secondary or tertiary RNA structures, such as hairpins and pseudoknots, which generally block initiation, but can also be part of IRES elements and therefore promote cap-independent translation; and, specific binding sites for regulatory complexes. Most of the regulatory mechanisms that are inhibitory; absent any change, mRNAs are translated. For endogenously packaging mRNA in MEVs, the mRNA that is encoded by DNA introduced into the microalgae cells can be modified, such as by deletion of the IRES, or modifying or interfering with ribosome binding proteins, or other such method known to those of skill in the art.

[0363] In some embodiments, the microalgae cells are transformed with a plasmid that is then integrated into the genome, and mRNA is transcribed (produced). Alternatively, a plasmid that remains episomal can be introduced. The mRNA can be translated by the microalgae ribosomes. In other embodiments, the mRNA can contain modifications so that it is optimized or designed for translation in an animal, such as a human, subject. For example, the mRNA can contain optimized codons for expression in a subject, such as human, for translation so that it is not efficiently or not translated by the microalgae ribosomes, but is translated by higher order species, such as animal, such as a human. The mRNA can be “optimized for codons” (“codon optimization”) that translate well in the cell type where the mRNA is intended to be translated. The encoding plasmid sequence can be “optimized for codons” such that the mRNA will not be translated, or translated inefficiently by microalgae ribosomes, but is translated by mammalian ribosomes, or will in such a way that the mRNA transcribed out of that plasmid will not translate (or will do it very inefficiently) in the microalgae cell but will efficiently translate in the cells of those to whom the MEVs are administered. For example, the IRES and/or Kozak sequences encoded in the mRNA can be optimized or designed for expression or efficient or high expression in a mammal, not microalgae. Other regulatory elements can be optimized or designed for translation in cells of the target host, such as mammalian host, or a particular cell type.

[0364] mRNA generally includes the m⁷GpppN cap structure at the 5′ end of the mRNA, and the poly(A) tail at the 3′ end, which are motifs that promote translation initiation. Secondary structures, such as hairpins, block translation. Internal ribosome entry sequences (IRESs) mediate cap-independent translation. Upstream open reading frames (uORFs) normally function as negative regulators by reducing translation from the main ORF. Also included are binding sites for proteins and/or RNA regulators, which usually inhibit, but also promote, translation. These sequences can be optimized for translation in the intended host, such as mammalian cell, and/or selected so that they are not or not efficiently translated by the microalgae ribosomes, but are translated by mammalian, such as human, ribosomes. For example, the mRNA can include a Kozak sequence that is optimized for mammalian translation.

### 2) Protein Cargo

[0365] Protein cargo includes therapeutic proteins. These can be encoded by DNA introduced into the microalgae cell by any method known to the skilled person, such as those discussed above. The DNA can include regulatory sequences, such as strong promoters, to ensure production of a relatively large amount of the protein, that is then packaged in the MEVs. The protein cargo is encoded by DNA constructs that include regulatory sequences, as well as codon optimization, for an efficient transcription and, subsequently, translation in the microalgae. The nucleic acid will include appropriate sequences for translation into proteins. In general, the constructs will include strong promoters, such as strong plant promoters, and eukaryotic viral promoters, as well as enhancers to ensure that high levels of proteins are produced in the microalgae cells and packaged in the MEVs.

[0366] Exemplary of heterologous protein cargo are antibodies, antigens, and anticancer therapeutic proteins, such as, but not limited to, anti-cancer antibodies, such as those that target tumor antigens, and checkpoint inhibitors. Examples of anti-cancer antibodies and other antibodies, include, but are not limited to, anti-17-IA cell surface antigen antibodies such as the antibody sold or provided under the trademark Panorex™ (edrecolomab); anti-4-1BB antibodies; anti-4Dc antibodies; anti-A33 antibodies such as A33 and CDP-833; anti-al integrin antibodies such as natalizumab; anti-a437 integrin antibodies such as LDP-02; anti-aVB1 integrin antibodies such as F-200, M-200, and SJ-749; anti-aVB3 integrin antibodies such as abciximab, CNTO-95, Mab-17E6, and humanized monoclonal antibody against the vitronectin receptor sold under the trademark Vitaxin™; anti-complement factor 5 (C5) antibodies such as 5G1.1; anti-CA125 antibodies such as sold or provided under the trademark OvaRex™ (oregovomab); anti-CD3 antibodies such as those sold or provided under the trademark Nuvion™ (visilizumab), and Rexomab; anti-CD4 antibodies such as IDEC-151, MDX-CD4, OKT4A; anti-CD6 antibodies such as Oncolysin B and Oncolysin CD6; anti-CD7 antibodies such as HB2; anti-CD19 antibodies such as B43, MT-103, and Oncolysin B; anti-CD20 antibodies such as 2H7, 2H7.v16, 2H7.v114, 2H7.v115, the product sold or provided under the trademark Bexxar™ (tositumomab), the antibody sold or provided under the trademark Rituxan® (rituximab), and the antibody sold or provided under the trademark Zevalin® (Ibritumomab tiuxetan); anti-CD22 antibodies such as the those sold or provided under the following generic names, tradenames, or trademarks: Lymphocide™ (epratuzumab); anti-CD23 antibodies, such as IDEC-152; anti-CD25 antibodies such as basiliximab and Zenapax™ (daclizumab); anti-CD30 antibodies such as AC10, MDX-060, and SGN-30; anti-CD33 antibodies, such as Mylotarg® (gemtuzumab ozogamicin), Oncolysin M, and Smart M 195; anti-CD38 antibodies; anti-CD40 antibodies, such as SGN-40 and toralizumab; anti-CD40L antibodies, such as 5c8, Ruplizumab (tradename Antova), and IDEC-131; anti-CD44 antibodies, such as bivatuzumab; anti-CD46 antibodies; anti-CD52 antibodies such as Campath® (alemtuzumab); anti-CD55 antibodies such as SC-1; anti-CD56 antibodies such as huN901-DM1; anti-CD64 antibodies such as MDX-33; anti-CD66e antibodies such as XR-303; anti-CD74 antibodies such as IMMU-1 10; anti-CD80 antibodies such as galiximab and IDEC-1 14; anti-CD89 antibodies such as MDX-214; anti-CD123 antibodies; anti-CD138 antibodies such as B-B4-DM1; anti-CD146 antibodies such as AA-98; anti-CD148 antibodies; anti-CEA antibodies such as cT84.66, labetuzumab, the bispecific Fab MN14-734 (Pentacea™, IBC Pharmaceuticals); anti-CTLA-4 antibodies such as MDX-101; anti-CXCR4 antibodies; anti-EGFR antibodies such as ABX-EGF, Erbitux® (cetuximab), IMC-C225, and Merck Mab 425; anti-EpCAM antibodies such as Crucell's anti-EpCAM, ING-1, and IS-IL-2; anti-ephrin B2/EphB4 antibodies; anti-Her2 antibodies such as Herceptin®, MDX-210; anti-FAP (fibroblast activation protein) antibodies such as sibrotuzumab; anti-ferritin antibodies such as NXT-211; anti-FGF-1 antibodies; anti-FGF-3 antibodies; anti-FGF-8 antibodies; anti-FGFR antibodies, anti-fibrin antibodies; anti-G250 antibodies, such as WX-G250, and Girentuximab (sold as Rencarex®); anti-GD2 ganglioside antibodies such as EMD-273063 and TriGem; anti-GD3 ganglioside antibodies such as BEC2, KW-2871, and mitumomab; anti-gpIIb/IIIa antibodies such as ReoPro®; anti-heparinase antibodies; anti-Her2/ErbB2 antibodies such as Herceptin® (trastuzumab), MDX-210, and pertuzumab; anti-HLA antibodies such as MA5-41779 (sold as Oncolym™), Smart 1D10; anti-HM1.24 antibodies; anti-ICAM antibodies such as ICM3; anti-IgA receptor antibodies; anti-IGF-1 antibodies such as CP-751871 and EM-164; anti-IGF-1R antibodies such as IMC-A12; anti-IL-6 antibodies such as CNTO-328 and elsilimomab; anti-IL-15 antibodies such as the antibody sold as HuMax®-IL15; anti-KDR antibodies; anti-laminin 5 antibodies; anti-Lewis Y antigen antibodies such as Hu3S193 and IGN-311; anti-MCAM antibodies; anti-Muc1 antibodies, such as BravaRex and TriAb; anti-NCAM antibodies, such as ERIC-1 and ICRT; anti-PEM antigen antibodies such as Theragyn and Therex; anti-PSA antibodies; anti-PSCA antibodies, such as IG8; anti-Ptk antibodies; anti-PTN antibodies; anti-RANKL antibodies such as AMG-162; anti-RLIP76 antibodies; anti-SK-1 antigen antibodies such as Monopharm C; anti-STEAP antibodies; anti-TAG72 antibodies such as CC49-SCA and MDX-220; anti-TGF-β antibodies such as CAT-152; anti-TNF-α antibodies such as CDP571, CDP870, D2E7, Humira® (adalimumab), and Remicade® (infliximab); anti-TRAIL-R1 and TRAIL-R2 antibodies; anti-VE-cadherin-2 antibodies; and anti-VLA-4 antibodies (Antegren™). Furthermore, anti-idiotype antibodies including but not limited to the GD3 epitope antibody BEC2 and the gp72 epitope antibody 105AD7, can be used. In addition, bispecific antibodies including but not limited to the anti-CD3/CD20 antibody Bi20 can be used.

[0367] Other heterologous cargo include, for example, immunomodulatory agents that increase or decrease production of one or more cytokines, up- or down-regulate self-antigen presentation, mask MHC antigens, or promote the proliferation, differentiation, migration, or activation state of one or more types of immune cells. Examples of immunomodulatory agents include but are not limited to cytokines such as TGFβ, IFNα, IFNβ, IFNγ, IL-2, IL4, IL-10; cytokine, chemokine, or receptor antagonists including antibodies, soluble receptors, and receptor-Fc fusions, such as those against BAFF, B7, CCR2, CCR5, CD2, CD3, CD4, CD6, CD7, CD8, CD11, CD14, CD15, CD17, CD18, CD20, CD23, CD28, CD40, CD40L, CD44, CD45, CD52, CD64, CD80, CD86, CD147, CD152, complement factors (C5, D), CTLA4, eotaxin, Fas, ICAM, IFNα, IFNβ, IFNγ, IFNAR, IgE, IL-1, IL-2, IL-2R, IL-4, IL-5R, IL-6, IL-8, IL-9 IL-12, IL-13, IL-13R1, IL-15, IL-18R, IL-23, integrins, LFA-1, LFA-3, MHC, selectins, TGFβ, TNFα, TNFβ, TNF-R1, T-cell receptor, including Enbrel® (etanercept), Humira® (adalimumab), and Remicade® (infliximab); heterologous anti-lymphocyte globulin; other immunomodulatory molecules such as anti-idiotypic antibodies for MHC binding peptides and MHC fragments.

[0368] Other heterologous cargo include cytokines which include, but are not limited to lymphokines, monokines, and traditional polypeptide hormones, and also chemokines, which can be classified under the umbrella of cytokines. Included among the cytokines are growth hormones such as human growth hormone, N-methionyl human growth hormone, and bovine growth hormone; parathyroid hormone; thyroxine; insulin; proinsulin; relaxin; prorelaxin; glycoprotein hormones such as follicle stimulating hormone (FSH), thyroid stimulating hormone (TSH), and luteinizing hormone (LH); hepatic growth factor; fibroblast growth factor; prolactin; placental lactogen; tumor necrosis factor-alpha and -beta; Müllerian-inhibiting substance; mouse gonadotropin-associated peptide; inhibin; activin; vascular endothelial growth factor; integrin; thrombopoietin (TPO); nerve growth factors such as NGF-beta; platelet-growth factor; transforming growth factors (TGFs) such as TGF-alpha and TGF-beta; insulin-like growth factor-I and -II; erythropoietin (EPO); osteoinductive factors; interferons such as interferon-alpha,-beta, and -gamma; colony stimulating factors (CSFs) such as macrophage-CSF (M-CSF); granulocyte-macrophage-CSF (GM-CSF); and granulocyte-CSF (G-CSF); interleukins (ILs) such as IL-1, IL-1alpha, IL-2, IL-3, IL-4, IL-5, IL-6, IL-7, IL-8, IL-9, IL-10, IL-11, IL-12; IL-15, a tumor necrosis factor such as TNF-alpha or TNF-beta; and other polypeptide factors including LIF and kit ligand (KL).

[0369] Other exemplary heterologous cargo include cytokines and other agents that stimulate cells of the immune system and enhance desired effector function. For example, agents that stimulate NK cells include IL-2; agents that stimulate macrophages include but are not limited to C5a, formyl peptides such as N-formyl-methionyl-leucyl-phenylalanine. Heterologous cargo include agents that stimulate neutrophils, such as, for example, G-CSF and GM-CSF. Additional agents include, but are not limited to, interferon gamma, IL-3 and IL-7.

[0370] Additional exemplary heterologous cargo include uses and treatments that can be effected with cargo-loaded MEVs are described, by way of example, as follows.

### b. Diseases and Methods of Treatment

[0371] As described above, the MEVs can be loaded with any desired heterologous cargo, including, but not limited to, nucleic acid molecules, proteins, detectable marker proteins and tags, gene editing systems, and others, and combinations thereof for delivering therapeutic molecules, serving as vaccines, and for use in human health, cosmetic, dermatological and diagnostic applications, industrial uses, and other uses. The MEVs can deliver regulators of gene pathways to produce a beneficial product, gene editing systems, such as CRISPR/cas to effect gene editing, and gene therapy products.

[0372] MEVs can carry cargo, for example, for treating a disease characterized by a genetic defect that results in a deficiency of a functional protein, or for treating a disease characterized by overexpression of a polypeptide. Non-limiting examples of diseases that can be treated by silencing of a target gene, for example using siRNA or microRNA (see, e.g., International Pub. No. WO 2013/048734) include cancer (e.g., lung cancer, leukemia and lymphoma, pancreatic cancer, colon cancer, prostate cancer, glioblastoma, ovarian cancer, breast cancer, head and neck cancer, liver cancer, skin cancer, and uterine cancer), cardiovascular diseases, ocular diseases (e.g., age-related macular degeneration, herpetic stromal keratitis, Glaucoma, dry eye syndrome, diabetic retinopathy, and conditions associated with ocular angiogenesis and ocular hypertension), neurological diseases (e.g., amyotrophic lateral sclerosis, Alzheimer's disease, myasthenic disorders, Huntington's disease, Spinocerebellar ataxia, frontotemporal dementia, Parkinson's disease, prion diseases, and Lafora disease, and those arising from ischemic or hypoxic conditions), kidney disorders, inflammatory or autoimmune diseases (e.g., ischemia or reperfusion injury, restenosis, Rheumatoid arthritis, inflammatory Bowel Disease, e.g., Crohn's Disease or Ulcerative Colitis, lupus, multiple sclerosis, diabetes, e.g., type II diabetes, and diabetic conditions, arthritis, e.g., rheumatoid or psoriatic), respiratory diseases (e.g., asthma, Chronic obstructive pulmonary diseases (COPD), cystic fibrosis, acute respiratory distress syndrome (ARDS), emphysema, and acute lung injury), hearing disorders, epilepsy, spinal cord injuries, oral mucositis, male infertility, uterine disorders, endometrial disorders or conditions, as well as conditions relating to metabolism (e.g., obesity), ischemia, stroke, alcohol metabolism and liver function (see, e.g., International Pub. Nos. WO 2006/029161, WO 2007/022470, WO 2007/130604, WO 2008/021157, WO 2009/104051, WO 2009/142822, WO 2019/217459, WO 2020/123083; European Pub. No. EP 2504435; and U.S. Patent Pub. Nos. U.S. 2011/0223665, U.S. 2012/0116360, U.S. 2012/0071540, U.S. 2016/0257956, U.S. 2015/0196648, and U.S. 2017/0304459). The RNAi molecule may target a gene that encodes, for example, an oncogene, a transcription factor, a receptor, an enzyme, a structural protein, a cytokine, a cytokine receptor, a lectin, a selectin, an immunoglobulin, a kinase and a phosphatase.

[0373] Other heterologous cargo and uses are contemplated. For example, MEVs can carry heterologous cargo, for example, for treating conditions resulting from trauma, such as wounds, burns, skin cuts, broken bones, hair loss, dermis exposure, mucosal exposure, fibrosis, lacerations, and ulcerations. MEVs can carry heterologous cargo, for example, for treating conditions resulting from natural or induced aging, in particular on the skin, or of the vision.

[0374] MEVs can be used to deliver heterologous cargo to treat, e.g., with gene silencing, or prevent, e.g., through vaccination, infectious diseases. For example, MEVs derived from antigen-pulsed macrophages or dendritic cells were shown to elicit an immune response when introduced into naïve animals (György et al. (2015) Annu. Rev. Pharmacol. Toxicol. 55:439-464). Gene silencing also can be used to target a pathogen-associated protein, such as a viral protein involved in immunosuppression of the host, replication of the pathogen, transmission of the pathogen, or maintenance of the infection; or a host protein which facilitates entry of the pathogen into the host, drug metabolism by the pathogen or host, replication or integration of the pathogen's genome, establishment or spread of infection in the host, or assembly of the next generation of pathogen. Pathogens can include, for example, RNA and DNA viruses such as arenaviruses, coronaviruses, influenza viruses, paramyxoviruses, flaviviruses (e.g., West Nile virus), picornaviruses (e.g., Coxsakievirus, Poliovirus, and Rhinovirus), rhabdoviruses, filoviruses, retroviruses (e.g., lentiviruses, and Rous sarcoma virus), adenoviruses, poxviruses, herpes viruses, human papilloma viruses, cytomegaloviruses, hepadnaviruses (e.g., Hepatitis B and C), rotaviruses, respiratory syncytial viruses, polyomaviruses, and others; bacteria; fungi; helminths; schistosomes; trypanosomes; parasites including plasmodiums (e.g., Plasmodium malariae and others); and mammalian transposable elements (see, e.g., International Pub. Nos. WO 2010/141724, WO 2011/071860, WO 2011/072292, WO 2013/126803, WO 2020/035620, and WO 2020/097540; Australian Pub. Nos. AU 2004257373 A1, AU 2013203219 B2, and AU 2016225873 A1; European Pub. Nos. EP 2395012, and EP 2888240; U.S. Patent Pub. Nos. U.S. 2011/0223665, U.S. 2014/0256785, and U.S. 2019/0032051; Japanese Pub. No. JP 2018-197239A; and Taiwanese Pub No. TW 201204351A).

[0375] MEVs also can be used to deliver mRNA molecules that encode therapeutically useful polypeptides. For example, in cases where subjects lack a specific gene product, the gene can be encoded in a nucleic acid molecule, such as an RNA molecule. The nucleic acid molecule encoding the gene product can be loaded into a MEV and delivered to a subject lacking the gene product. For example, diseases that occur due to the absence or deficiency of a gene product, include, but are not limited to, lysosomal storage disorders, metabolic disorders of the urea cycle, SMN1-related spinal muscular atrophy (SMA); amyotrophic lateral sclerosis (ALS); GALT-related galactosemia; cystic fibrosis (CF); SLC3A1-related disorders including cystinuria; COL4A5-related disorders including Alport syndrome; galactocerebrosidase deficiencies; X-linked adrenoleukodystrophy and adrenomyeloneuropathy; Friedreich's ataxia; Pelizaeus-Merzbacher disease; TSC1 and TSC2-related tuberous sclerosis; Sanfilippo B syndrome (MPS IIIB); CTNS-related cystinosis; the FMR1-related disorders which include Fragile X syndrome, Fragile X-Associated Tremor/Ataxia Syndrome and Fragile X Premature Ovarian Failure Syndrome; Prader-Willi syndrome; hereditary hemorrhagic telangiectasia; Niemann-Pick disease Type C1; the neuronal ceroid lipofuscinoses-related diseases including Juvenile Neuronal Ceroid Lipofuscinosis (JNCL), Juvenile Batten disease, Santavuori-Haltia disease, Jansky-Bielschowsky disease, and PTT-1 and TPP1 deficiencies; EIF2B1-, EIF2B2-, EIF2B3-, EIF2B4- and EIF2B5-related childhood ataxia with central nervous system hypomyelination/vanishing white matter; CACNA1A and CACNB4-related Episodic Ataxia Type 2; the MECP2-related disorders including Classic Rett Syndrome, MECP2-related Severe Neonatal Encephalopathy and PPM-X Syndrome; CDKL5-related Atypical Rett Syndrome; Kennedy's disease (SBMA); Notch-3 related cerebral autosomal dominant arteriopathy with subcortical infarcts and leukoencephalopathy (CADASIL); SCNIA- and SCN1B-related seizure disorders; the Polymerase G-related disorders, including Alpers-Huttenlocher syndrome, POLG-related sensory ataxic neuropathy, dysarthria, and ophthalmoparesis, and autosomal dominant and recessive progressive external ophthalmoplegia with mitochondrial DNA deletions; X-Linked adrenal hypoplasia; X-linked agammaglobulinemia; and Wilson's disease (see, e.g., International Pub. Nos. WO 2011/068810, WO 2019/243574, WO 2019/092287, and WO 2020/099682).

[0376] The MEVs can be loaded with a gene editing system such as clustered regularly interspaced short palindromic repeats (CRISPR)-CRISPR-associated protein 9 (Cas9), and also other technologies that are used to edit genomes. These include, for example: transcription activator-like effector nucleases (TALENs), zinc-finger nucleases (ZFNs), and homing endonucleases or meganucleases. Nucleic acid encoding the editing system is introduced into the microalgae or expression and packaging in the MEVs.

[0377] CRISPR technology allows for the modification of the genome in a living organism, and is based on the bacterial CRISPR/Cas9 antiviral defense system (see e.g., SEQ ID NOs: 70 and 71 for an exemplary Cas9 coding and encoded protein sequences). The system allows for DNA cleavage at a target site. The type II CRISPR system incorporates sequences from invading foreign nucleic acids, such as DNA from viruses or plasmids, between CRISPR repeat sequences encoded within the host genome. Transcripts from the CRISPR repeat sequences are processed into CRISPR RNAs (crRNAs). Each crRNAs harbors a variable sequence transcribed from the foreign DNA and a part of the CRISPR repeat. Each crRNA hybridizes with a second transactivating CRISPR RNA (tracrRNA) and these two RNAs complex with and direct the Cas9 nuclease to cleave the target DNA sequence. By delivering a Cas nuclease complexed with a synthetic guide RNA (gRNA), which contains a fusion of a crRNA and a tracrRNA, into a cell, the cell's genome can be cut at a desired location, allowing existing genes to be removed and/or new ones added in vivo (Sander et al. (2014) Nat. Biotechnol. 32 (4): 347-355). The CRISPR technology can be used with the Cas polypeptide or the single RNA guided endonuclease Cpf1 to effect genome modification, and can be delivered in lipid nanoparticles, EVs and other vesicles (see, e.g., International PCT publication Nos. WO 2017/161010, WO 2019/238626, and WO 2020/097540).

[0378] MEVs also can be used to treat diseases, including but not limited to those listed above, by introduction of an endogenous cargo in form of a therapeutic protein, or polypeptide, to a target cell. Non-limiting examples of such therapeutic can be a biologic therapeutic agent selected from an allergen, adjuvant, antigen, or immunogen, antibody (e.g., whole antibodies, polyclonal, monoclonal and recombinant antibodies, fragments thereof, and further includes single-chain antibodies, humanized antibodies, murine antibodies, chimeric, mouse-human, mouse-primate, primate-human monoclonal antibodies, anti-idiotype antibodies, antibody fragments, such as, e.g., scFv, (scFv) 2, Fab, Fab′, and F (ab′) 2, F (ab) 2, Fv, dAb, and Fd fragments, diabodies, and antibody-related polypeptides), cytokine, hormone, factor, cofactor, cell component protein, metabolic enzyme, immunoregulatory enzyme, interferon, interleukin, gastrointestinal enzyme, an enzyme or factor implicated in hemostasis, growth regulatory enzyme, vaccine, antithrombotic, toxin, antitoxin, or diagnostic or imaging biologic agent (see, e.g., International Pub. Nos. WO 2017/203260, WO 2018/102397, WO 2019/081474, WO 2019/155060, WO 2020/041720; Australian Pub. No. AU 2018365299A1; Singapore Pub. No. SG 11201811149TA; and U.S. Patent Pub. No. U.S. 2019/0202892). For example, MEV therapies can be used to treat Crohn's disease, ulcerative colitis, ankylosing spondylitis, rheumatoid arthritis, multiple sclerosis, systemic lupus erythematosus, sarcoidosis, idiopathic pulmonary fibrosis, psoriasis, tumor necrosis factor (TNF) receptor-associated periodic syndrome (TRAPS), deficiency of the interleukin-1 receptor antagonist (DIRA), endometriosis, autoimmune hepatitis, scleroderma, myositis, stroke, acute spinal cord injury, vasculitis, Guillain-Barre syndrome, acute myocardial infarction, acute respiratory distress syndrome (ARDS), sepsis, meningitis, encephalitis, liver failure, non-alcoholic steatohepatitis (NASH), non-alcoholic fatty liver disease (NAFLD), kidney failure, heart failure or any acute or chronic organ failure and the associated underlying etiology, graft-vs-host disease, Duchenne muscular dystrophy and other muscular dystrophies, lysosomal storage diseases, neurodegenerative diseases, cancer-induced cachexia, anorexia, diabetes mellitus type 2, and cancers (e.g., acute lymphoblastic leukemia, ALL), acute myeloid leukemia, adrenocortical carcinoma, AIDS-related cancers, AIDS-related lymphoma, anal cancer, appendix cancer, astrocytoma, cerebellar or cerebral, basal-cell carcinoma, bile duct cancer, bladder cancer, bone tumor, brainstem glioma, brain cancer, brain tumor (cerebellar astrocytoma, cerebral astrocytoma/malignant glioma, ependymoma, medulloblastoma, supratentorial primitive neuroectodermal tumors, visual pathway and hypothalamic glioma), breast cancer, bronchial adenomas/carcinoids, Burkitt's lymphoma, carcinoid tumor (childhood, gastrointestinal), carcinoma of unknown primary, central nervous system lymphoma, cerebellar astrocytoma/malignant glioma, cervical cancer, chronic lymphocytic leukemia, chronic myelogenous leukemia, chronic myeloproliferative disorders, colon Cancer, cutaneous T-cell lymphoma, desmoplastic small round cell tumor, endometrial cancer, ependymoma, esophageal cancer, extracranial germ cell tumor, extragonadal germ cell tumor, extrahepatic bile duct cancer, eye cancer (intraocular melanoma, retinoblastoma), gallbladder cancer, gastric cancer, gastrointestinal carcinoid tumor, gastrointestinal stromal tumor (GIST), germ cell tumor (extracranial, extragonadal, or ovarian), gestational trophoblastic tumor, glioma (glioma of the brain stem, cerebral astrocytoma, visual pathway and hypothalamic glioma), gastric carcinoid, hairy cell leukemia, head and neck cancer, heart cancer, hepatocellular (liver) cancer, Hodgkin lymphoma, hypopharyngeal cancer, intraocular melanoma, islet cell carcinoma (endocrine pancreas), Kaposi sarcoma, kidney cancer (renal cell cancer), laryngeal cancer, leukemias (acute lymphoblastic, acute myeloid, chronic lymphocytic, chronic myelogenous, hairy cell leukemia), lip and oral cancer, cavity cancer, liposarcoma, liver cancer (primary), lung cancer (non-small cell, small cell), lymphomas, AIDS-related lymphoma, Burkitt lymphoma, cutaneous T-cell lymphoma, Hodgkin lymphoma, non-Hodgkin, medulloblastoma, Merkel cell carcinoma, mesothelioma, metastatic squamous neck cancer with occult primary, mouth cancer, multiple endocrine neoplasia syndrome, multiple myeloma/plasma cell neoplasm, mycosis fungoides, myelodysplastic/myeloproliferative diseases, myelogenous leukemia, chronic myeloid leukemia, myeloma, nasal cavity and paranasal sinus cancer, nasopharyngeal carcinoma, neuroblastoma, oral cancer, oropharyngeal cancer, osteosarcoma/malignant fibrous histiocytoma of bone, ovarian cancer, ovarian epithelial cancer (surface epithelial-stromal tumor), ovarian germ cell tumor, ovarian low malignant potential tumor, pancreatic cancer, pancreatic islet cell cancer, parathyroid cancer, penile cancer, pharyngeal cancer, pheochromocytoma, pineal astrocytoma, pineal germinoma, pineoblastoma and supratentorial primitive neuroectodermal tumors, pituitary adenoma, pleuropulmonary blastoma, prostate cancer, rectal cancer, renal cell carcinoma (kidney cancer), retinoblastoma, rhabdomyosarcoma, salivary gland cancer, sarcoma (Ewing family of tumors sarcoma, Kaposi sarcoma, soft tissue sarcoma, uterine sarcoma), Sézary syndrome, skin cancer (nonmelanoma, melanoma), small intestine cancer, squamous cell, squamous neck cancer, stomach cancer, supratentorial primitive neuroectodermal tumor, testicular cancer, throat cancer, thymoma and thymic carcinoma, thyroid cancer, transitional cell cancer of the renal pelvis and ureter, urethral cancer, uterine cancer, uterine sarcoma, vaginal cancer, vulvar cancer, Waldenstrom's macroglobulinemia, and/or Wilms' tumor) (see, e.g., International Pub. Nos. WO 2017/203260 and WO 2019/155060A1; and U.S. Patent Pub. No. U.S. 2019/0388347).

### c. Cosmetic and Dermatological Applications

[0379] MEVs carrying cargo of pharmacological agents also can be used for cosmetic and dermatological applications. For example, skin care products such as creams, lotions, gels, emulsions, ointments, pastes, powders, liniments, sunscreens, and shampoos comprising EVs, particularly from stem cells, can be used to improve and/or alleviate symptoms and problems such as dry skin, elasticity, wrinkles, folds, ridges, and/or skin creases (see, e.g., Singapore Pub. No. SG 11201811149TA). Stem cell EVs, which inherently carry cytokines, growth and transcription factors among their cargo, also have been shown to control inflammation, accelerate skin cell migration and proliferation, control wound scarring, improve angiogenesis, and ameliorate signs of skin aging. Although the exact mechanisms are being elucidated, the effect of stem cell EVs on wound healing may rely in the vertical transfer on microRNAs or proteins to skill cells. Angiogenesis, a part of wound healing, can be induced by stem cell EVs. Stem cell EVs also have beneficial effects for cellular matrix maintenance and collagen production, and have been shown to play a role in rejuvenating skin cells (da Fonseca Ferreira, A. and Gomes, D. (2019) Bioengineering (Basel) 6 (1): 4). MEVs loaded with a desired cargo can thus be used for cosmetic and dermatological applications.

### E. Pharmaceutical Compositions, Formulations, Kits, Articles of Manufacture, and Combinations, and Drug Delivery Systems

### 1. Pharmaceutical Compositions and Formulations

[0380] The compositions containing the MEVs and loaded MEVs provided herein can be formulated as pharmaceutical compositions provided for administration by a desired route, such as oral, mucosal, intravenous, intranasal, and others. Pharmaceutically acceptable compositions are prepared in view of approvals for a regulatory agency or other agency prepared in accordance with generally recognized pharmacopeia for use in human applications. Typically, compounds are formulated into pharmaceutical compositions using techniques and procedures well-known in the art (see e.g., Ansel Introduction to Pharmaceutical Dosage Forms, Fourth Edition, 1985, 126).

[0381] The pharmaceutical composition can be used for therapeutic, prophylactic, vaccinal, cosmetic, and/or diagnostic applications. The cargo-loaded MEVs provided herein can be formulated with a pharmaceutical acceptable carrier or diluent. Generally, such pharmaceutical compositions include components that do not significantly impair the biological properties or other properties of the cargo. Each component is pharmaceutically and physiologically acceptable so that it is compatible with the other ingredients and not injurious to the subject to whom it is to be administered. The formulations can be provided in unit dosage form and can be prepared by methods well-known in the art of pharmacy, including but not limited to, tablets, pills, powders, liquid solutions or suspensions (e.g., including injectable, ingestible and topical formulations (e.g., eye drops, gels, pastes, creams, or ointments)), aerosols (e.g., nasal sprays, and inhalers), liposomes, suppositories, pessaries, injectable and infusible solution and sustained release forms. See, e.g., Gilman, et al. (eds. 1990) Goodman and Gilman's: The Pharmacological Bases of Therapeutics, 8th Ed., Pergamon Press; and Remington's Pharmaceutical Sciences, 17th ed. (1990), Mack Publishing Co., Easton, Pa.; Avis, et al. (eds. 1993) Pharmaceutical Dosage Forms: Parenteral Medications Dekker, NY; Lieberman, et al. (eds. 1990) Pharmaceutical Dosage Forms: Tablets Dekker, NY; and Lieberman, et al. (eds. 1990) Pharmaceutical Dosage Forms: Disperse Systems Dekker, NY. When administered systemically, the therapeutic composition is sterile, pyrogen-free, generally free of particulate matter, and in a parenterally acceptable solution having due regard for pH, isotonicity, and stability. These conditions are known to those skilled in the art. Methods for preparing parenterally administrable compositions are well-known or will be apparent to those skilled in the art and are described in more detail in, e.g., “Remington: The Science and Practice of Pharmacy (Formerly Remington's Pharmaceutical Sciences)”, 19th ed., Mack Publishing Company, Easton, Pa. (1995).

[0382] Pharmaceutical compositions provided herein can be in various forms, e.g., in solid, semi-solid, liquid, powder, aqueous, and lyophilized form. Examples of suitable pharmaceutical carriers are known in the art and include but are not limited to water, buffering agents, saline solutions, phosphate buffered saline solutions, various types of wetting agents, sterile solutions, alcohols, gum arabic, vegetable oils, benzyl alcohols, gelatin, glycerin, carbohydrates such as lactose, sucrose, amylose or starch, magnesium stearate, talc, silicic acid, viscous paraffin, perfume oil, fatty acid monoglycerides and diglycerides, pentaerythritol fatty acid esters, hydroxy methylcellulose, and powders, among others. Pharmaceutical compositions provided herein can contain other additives including, for example, antioxidants, preservatives, antimicrobial agents, analgesic agents, binders, disintegrants, coloring, diluents, excipients, extenders, glidants, solubilizers, stabilizers, tonicity agents, vehicles, viscosity agents, flavoring agents, emulsions, such as oil/water emulsions, emulsifying and suspending agents, such as acacia, agar, alginic acid, sodium alginate, bentonite, carbomer, carrageenan, carboxymethylcellulose, cellulose, cholesterol, gelatin, hydroxyethyl cellulose, hydroxypropyl cellulose, hydroxypropyl methylcellulose, methylcellulose, octoxynol-9, oleyl alcohol, povidone, propylene glycol monostearate, sodium lauryl sulfate, sorbitan esters, stearyl alcohol, tragacanth, xanthan gum, and derivatives thereof, solvents, and miscellaneous ingredients such as crystalline cellulose, microcrystalline cellulose, citric acid, dextrin, dextrose, liquid glucose, lactic acid, lactose, magnesium chloride, potassium metaphosphate, and starch, among others (see, generally, Alfonso R. Gennaro (2000) Remington: The Science and Practice of Pharmacy, 20th Edition. Baltimore, MD: Lippincott Williams & Wilkins). Such carriers and/or additives can be formulated by conventional methods and can be administered to the subject at a suitable dose. Stabilizing agents such as lipids, nuclease inhibitors, polymers, and chelating agents can preserve the compositions from degradation within the body.

[0383] Pharmaceutical compositions can include a carrier, such as a diluent, adjuvant, excipient, or vehicle. Such pharmaceutical carriers can be sterile liquids, such as water and oils, including those of petroleum, animal, vegetable or synthetic origin, such as peanut oil, soybean oil, mineral oil, and sesame oil. Water is a typical carrier when the pharmaceutical composition is administered intravenously. Saline solutions and aqueous dextrose and glycerol solutions also can be employed as liquid carriers, particularly for injectable solutions.

[0384] Compositions can contain, along with an active ingredient, a diluent, such as lactose, sucrose, dicalcium phosphate, and carboxymethylcellulose; a lubricant, such as magnesium stearate, calcium stearate and talc; and a binder, such as starch, natural gums, such as gum acacia, gelatin, glucose, molasses, polyvinylpyrrolidone, celluloses and derivatives thereof, povidone, crospovidone, and other such binders known to those of skill in the art. Suitable pharmaceutical excipients include starch, glucose, lactose, sucrose, gelatin, malt, rice, flour, chalk, silica gel, sodium stearate, glycerol monostearate, talc, sodium chloride, dried skim milk, glycerol, propylene glycol, water, and ethanol. A composition, if desired, also can contain suitable amounts of wetting or emulsifying agents, or pH buffering agents, for example, acetate, sodium citrate, cyclodextrin derivatives, sorbitan monolaurate, triethanolamine sodium acetate, triethanolamine oleate, and other such agents.

[0385] The pharmaceutical compositions provided herein can contain other additives, including, for example, antioxidants, preservatives, antimicrobial agents, analgesic agents, binders, disintegrants, colorings, diluents, excipients, extenders, glidants, solubilizers, stabilizers, tonicity agents, vehicles, viscosity agents, flavoring agents, emulsions, such as oil-in-water or water-in-oil emulsions, emulsifying and suspending agents, such as acacia, agar, alginic acid, sodium alginate, bentonite, carbomer, carrageenan, carboxymethylcellulose, cellulose, cholesterol, gelatin, hydroxyethyl cellulose, hydroxypropyl cellulose, hydroxypropyl methylcellulose, methylcellulose, octoxynol-9, oleyl alcohol, povidone, propylene glycol monostearate, sodium lauryl sulfate, sorbitan esters, stearyl alcohol, tragacanth, xanthan gum, and derivatives thereof, solvents, and miscellaneous ingredients, such as crystalline cellulose, microcrystalline cellulose, citric acid, dextrin, dextrose, liquid glucose, lactic acid, lactose, magnesium chloride, potassium metaphosphate, and starch, among others (see, generally, Alfonso R. Gennaro (2000) Remington: The Science and Practice of Pharmacy, 20th Edition. Baltimore, MD: Lippincott Williams & Wilkins). Such carriers and/or additives can be formulated by conventional methods and can be administered to the subject at a suitable dose. Stabilizing agents, such as lipids, nuclease inhibitors, polymers, and chelating agents, can preserve the compositions from degradation within the body.

[0386] The formulation should suit the mode of administration. For example, the active compound can be formulated for parenteral administration by injection (e.g., by bolus injection, or continuous infusion). The injectable compositions can take such forms as suspensions, solutions or emulsions in oily or aqueous vehicles. The sterile injectable preparation also can be a sterile injectable solution, or a suspension in a non-toxic parenterally-acceptable diluent or solvent, for example, as a solution in 1,4-butanediol. Sterile, fixed oils are conventionally employed as a solvent or suspending medium. For this purpose, any bland fixed oil can be employed, including, but not limited to, synthetic mono- or diglycerides, fatty acids (including oleic acid), naturally occurring vegetable oils, such as sesame oil, coconut oil, peanut oil, cottonseed oil, and other oils, or synthetic fatty vehicles like ethyl oleate. Buffers, preservatives, antioxidants, and the suitable ingredients, can be incorporated as required, or, alternatively, can comprise the formulation.

[0387] The compositions can take the form of solutions, suspensions, emulsions, tablets, pills, capsules, powders, granules, and sustained release formulations. Capsules and cartridges of, e.g., gelatin, for use in an inhaler or insufflator, can be formulated containing a powder mix of a therapeutic compound and a suitable powder base, such as lactose or starch. A composition can be formulated as a suppository, with traditional binders and carriers, such as triglycerides.

[0388] For oral administration, for example, the MEVs can be formulated as a liquid, including as an emulsion, such as a nanoemulsion or microemulsion, or can be provided in capsule form, such as in a soft gel, in which the liquid is introduced, or as soft gel or other such capsule in which the liquid is introduced. The MEVs can be lyophilized to produce a powder, which can be introduced into capsules or formed into tablets, such as compressed powder tablets or layered tablets, in any desired geometry. For oral administration the MEVs can be provided as a liquid pharmaceutical composition, as discussed above.

[0389] For inhalation and also for intranasal administration, the MEVs can be formulated for administration as an aerosol. The MEVs can be formulated as an emulsion for use as an aerosol for inhalation into the lungs or for intranasal administration.

[0390] Oral formulations can include standard carriers, such as pharmaceutical grades of mannitol, lactose, starch, magnesium stearate, sodium saccharine, cellulose, magnesium carbonate, and other such agents. Preparations for oral administration also can be suitably formulated with protease inhibitors, such as a Bowman-Birk inhibitor, a conjugated Bowman-Birk inhibitor, aprotinin and camostat. Examples of suitable pharmaceutical carriers are described in “Remington's Pharmaceutical Sciences” by E. W. Martin. Such compositions will contain a therapeutically effective amount of the compound, generally in purified form, together with a suitable amount of carrier, so as to provide the compound in a form for proper administration to a subject or patient.

[0391] In some examples, the MEVs can be dried, such as by lyophilization, to form a dry powder, which can be stored. The dry powder can be reconstituted by adding a pharmaceutically acceptable carrier, to produce a composition for administration as a liquid, such as orally or intravenously or other suitable route. The dry powder can be introduced into a capsule, such as soft gel capsule, or pressed into a tablet or mixed with other carriers to form a layered tablet.

[0392] Tablets and other forms typically contain other excipients. These excipients include, for example, tablet disintegrants, such as corn starch, glidants, such as silicon dioxide, and lubricants such as magnesium stearate. The compositions contain minor amounts by weight of glidants and lubricants, e.g., each two percent (2%) or less by weight. Tablet disintegrants are optionally present, and, if present, are included in sufficient amounts to assure that the tablet disintegrates upon ingestion. For example, disintegrants, such as corn starch, can be employed at concentrations of from about zero to about 30 percent by weight of the composition.

[0393] Free flowing powders also can be used to administer the active agent by inhalation using a dry powder inhaler. Such dry powder inhalers typically administer the active agent as a free-flowing powder that is dispersed in a patient's air-stream during inspiration. In order to achieve a free flowing powder, the active agent is typically formulated with a suitable excipient such as lactose or starch. For example, such a dry powder formulation can be made, for example, by combining the lactose with the active agent and then dry blending the components. Alternatively, if desired, the active agent can be formulated without an excipient. The pharmaceutical composition is then typically loaded into a dry powder dispenser, or into inhalation cartridges or capsules for use with a dry powder delivery device. Examples of dry powder inhaler delivery devices include Diskhaler® (GlaxoSmithKline, Research Triangle Park, NC) (see, e.g., U.S. Pat. No. 5,035,237); Diskus (GlaxoSmithKline) (see, e.g., U.S. Pat. No. 6,378,519; Turbuhaler™ (AstraZeneca, Wilmington, Del.) (see, e.g., U.S. Pat. No. 4,524,769); Rotahaler (GlaxoSmithKline) (see, e.g., U.S. Pat. No. 4,353,365) and HandiHaler® (Boehringer Ingelheim). Further examples of suitable DPI devices are described in U.S. Pat. Nos. 5,415,162, 5,239,993, and 5,715,810 and references cited therein.

[0394] The route of administration is in accord with known methods. These include, but are not limited to, intramuscular injection or other injection, subcutaneous administration, infusion by intravenous, intranasal, intraperitoneal, intracerebral, intramuscular, subcutaneous, intraocular, intraarterial, intrathecal, inhalation or intralesional routes, topical, rectal, mucosal, and by sustained release systems. The MEVs or cargo-loaded MEVs can be administered continuously by infusion or by bolus injection.

[0395] One can administer the MEVs or cargo-loaded MEVs in a local or systemic manner, such as by oral administration. Oral formulations can be solids or liquids or combinations thereof. Solid formulations for oral administration include, for example, liquids, tablets, pills, powders, granules, capsules, films, wafers, and other such forms. Liquids for oral administration include, for example, elixirs, suspensions, and emulsions.

[0396] Solid formulations are prepared by mixing lyophilized MEVs or a composition containing the MEVs with one or more suitable excipients such as starch, calcium carbonate, sucrose, lactose, and/or gelatin, as discussed above. If liquid MEVs are mixed, the resulting compositions can be lyophilized to produce a powder, which can be formed into an oral dosage form such as a tablet or film, or loaded into gel capsules. Liquid formulations for oral administrations include suspensions, solutions, and emulsions. Formulations for parenteral administration are sterilized aqueous solutions, water-insoluble excipients, suspensions, emulsions, lyophilized preparations and suppositories.

[0397] As shown herein, biodistribution of the MEVs is a function of the route of administration. For example, as shown oral administration of the MEVs enters the gastro-intestinal tract and subsequently are found in the spleen, including the white spleen. Following intranasal administration, MEVs are found in the brain.

[0398] The MEVs or cargo-loaded MEVs can be prepared in a mixture with a pharmaceutically acceptable carrier. Techniques for formulation and administration of the compounds are known to one of skill in the art (see e.g., “Remington's Pharmaceutical Sciences,” Mack Publishing Co., Easton, Pa.). This therapeutic composition can be administered intravenously or through the nose or lung, such as a liquid or powder aerosol (lyophilized). The composition also can be administered parenterally or subcutaneously as desired. When administered systematically, the therapeutic composition should be sterile, pyrogen-free and in a parenterally acceptable solution having due regard for pH, isotonicity, and stability. These conditions are known to those skilled in the art.

[0399] Pharmaceutical compositions suitable for use include compositions wherein the MEVs or cargo-loaded MEVs are contained in an amount effective to achieve their intended purpose. Determination of a therapeutically effective amount is well within the capability of those skilled in the art. Therapeutically effective dosages can be determined by using in vitro and in vivo methods, and/or by a skilled person.

[0400] Therapeutic formulations can be administered in many conventional dosage formulations. Dosage formulations of Cargo-loaded MEVs provided herein are prepared for storage or administration by mixing the compound having the desired degree of purity with physiologically acceptable carriers, excipients, or stabilizers. Such materials are non-toxic to the recipients at the dosages and concentrations employed, and can include buffers such as Tris HCl, phosphate, citrate, acetate and other organic acid salts; antioxidants such as ascorbic acid; low molecular weight (less than about ten residues) peptides such as polyarginine, proteins, such as serum albumin, gelatin, or immunoglobulins; hydrophilic polymers such as polyvinylpyrrolidone; amino acids such as glycine, glutamic acid, aspartic acid, or arginine; monosaccharides, disaccharides, and other carbohydrates including cellulose or its derivatives, glucose, mannose, or dextrins; chelating agents such as EDTA; sugar alcohols such as mannitol or sorbitol; counterions such as sodium and/or nonionic surfactants such as TWEEN (polysorbates), Pluronic, polyethylene glycol, and others.

[0401] In particular examples herein, provided are pharmaceutical compositions that contain a stabilizing agent. The stabilizing agent can be an amino acid, amino acid derivative, amine, sugar, polyol, salt or surfactant. In some examples, the stable co-formulations contain a single stabilizing agent. In other examples, the stable co-formulations contain 2, 3, 4, 5 or 6 different stabilizing agents. For example, the stabilizing agent can be a sugar or polyol, such as a glycerol, sorbitol, mannitol, inositol, sucrose or trehalose. In particular examples, the stabilizing agent is sucrose. In other examples, the stabilizing agent is trehalose. The concentration of the sugar or polyol is from or from about 100 mM to 500 mM, 100 mM to 400 mM, 100 mM to 300 mM, 100 mM to 200 mM, 200 mM to 500 mM, 200 mM to 400 mM, 200 mM to 300 mM, 250 mM to 500 mM, 250 mM to 400 mM, 250 mM to 300 mM, 300 mM to 500 mM, 300 mM to 400 mM, or 400 mM to 500 mM, each inclusive.

[0402] In examples, the stabilizing agent can be a surfactant that is a polypropylene glycol, polyethylene glycol, glycerin, sorbitol, poloxamer and polysorbate. For example, the surfactant can be a polypropylene glycol, polyethylene glycol, glycerin, sorbitol, poloxamer and polysorbate, such as a poloxamer 188, polysorbate 20 and polysorbate 80. In particular examples, the stabilizing agent is polysorbate 80. The concentration of surfactant, as a % of mass concentration (w/v) in the formulation, is between or about between 0.005% to 1.0%, 0.01% to 0.5%, 0.01% to 0.1%, 0.01% to 0.05%, or 0.01% to 0.02%, each inclusive.

[0403] When used for in vivo administration, the formulation should be sterile and can be formulated according to conventional pharmaceutical practice. This is readily accomplished by filtration through sterile filtration membranes, prior to or following lyophilization and reconstitution. The MEVs or cargo-loaded MEVs can be stored in lyophilized form or in solution; they can be frozen or refrigerated. Other vehicles such as naturally occurring vegetable oil like sesame, peanut, or cottonseed oil or a synthetic fatty vehicle like ethyl oleate can be included. Buffers, preservatives, and antioxidants can be incorporated according to accepted pharmaceutical practice.

[0404] The MEVs or cargo-loaded MEVs provided herein, can be provided at a concentration in the composition of from or from about 0.1 to 10 mg/mL or higher or lower amounts, depending upon the application and the subject, such as, for example a concentration that is at least or at least about 0.1, 0.2, 0.3, 0.4, 0.5, 0.6, 0.7, 0.8, 0.9, 1.0, 1.5, 2.0, 2.5, 3.0, 3.5, 4.0, 4.5, 5.0, 5.5, 6.0, 6.5, 7.0, 7.5, 8.0, 8.5, 9.0, 9.5, 10 mg/mL or more. The volume of the solution can be at or about 1 to 100 mL, such as, for example, at least or about at least or 0.5, 1, 2, 3, 4, 5, 10, 15, 20, 25, 30, 35, 40, 45, 50, 55, 60, 65, 70, 75, 80, 85, 90, 95, 100 mL or more. In some examples, the MEVs or cargo-loaded MEVs are supplied in phosphate buffered saline.

[0405] The MEVs or cargo-loaded MEVs provided herein can be provided as a controlled release or sustained release composition. Polymeric materials are known in the art for the formulation of pills and capsules which can achieve controlled or sustained release of the Cargo-loaded MEVs provided herein (see, e.g., Medical Applications of Controlled Release, Langer and Wise (eds.), CRC Pres., Boca Raton, Fla. (1974); Controlled Drug Bioavailability, Drug Product Design and Performance, Smolen and Ball (eds.), Wiley, New York (1984); Langer et al. (1983) J. Macromol. Sci. 23:61; see also Levy et al. (1985) Science 228:190; During et al. (1989) Ann. Neurol. 25:351; Howard et al. (1989) J. Neurosurg. 71:105; U.S. Pat. Nos. 5,679,377, 5,916,597, 5,912,015, 5,989,463, 5,128,326; and PCT Publication Nos. WO 99/15154 and WO 99/20253). Examples of polymers used in sustained release formulations include, but are not limited to, poly(2-hydroxy ethyl methacrylate), poly(methyl methacrylate), poly(acrylic acid), poly(ethylene-co-vinyl acetate), poly(methacrylic acid), polyglycolides (PLG), polyanhydrides, poly(N-vinyl pyrrolidone), poly(vinyl alcohol), polyacrylamide, poly(ethylene glycol), polylactides (PLA), poly(lactide-co-glycolides) (PLGA), and polyorthoesters. Generally, the polymer used in a sustained release formulation is inert, free of leachable impurities, stable on storage, sterile, and biodegradable. Any technique known in the art for the production of sustained release formulation can be used to produce a sustained release formulation containing the MEVs or cargo-loaded MEVs provided herein.

[0406] In some examples, the pharmaceutical composition contains the MEVs or cargo-loaded MEVs provided herein and one or more additional agents, such as an antibody or other therapeutic, for combination therapy.

### 2. Articles of Manufacture/Kits and Combinations

[0407] Pharmaceutical compositions of the MEVs or cargo-loaded MEVs can be packaged as articles of manufacture containing packaging material, a pharmaceutical composition which is effective for treating a disease or condition that can be treated by administration of the particular MEVs or cargo-loaded MEVs, such as the diseases and conditions described herein or known in the art, and a label that indicates that the cargo, such as an antibody or nucleic acid molecule, is to be used for treating the infection, disease or disorder. The pharmaceutical compositions can be packaged in unit dosage forms containing an amount of the pharmaceutical composition for a single dose or multiple doses. The packaged compositions can contain a lyophilized powder of the pharmaceutical compositions containing the cargo-loaded MEVs which can be reconstituted (e.g., with water or saline) prior to administration.

[0408] The articles of manufacture provided herein contain packaging materials. Packaging materials for use in packaging pharmaceutical products are well-known to those of skill in the art (see, e.g., U.S. Pat. Nos. 5,323,907, 5,052,558 and 5,033,252). Examples of pharmaceutical packaging materials include, but are not limited to, blister packs, bottles, tubes, inhalers (e.g., pressurized metered dose inhalers (MDI), dry powder inhalers (DPI), nebulizers (e.g., jet or ultrasonic nebulizers) and other single breath liquid systems), pumps, bags, vials, containers, syringes, bottles, and any packaging material suitable for a selected formulation and intended mode of administration and treatment.

[0409] The MEVs or cargo-loaded MEVs can be provided as combinations and as kits. Kits optionally can include one or more components such as instructions for use, devices and additional reagents (e.g., sterilized water or saline solutions for dilution of the compositions and/or reconstitution of lyophilized protein), and components, such as tubes, containers and syringes for practice of the methods. Exemplary kits can include the MEVs or cargo-loaded MEVs provided herein, and can optionally include instructions for use, a device for administering the MEVs or cargo-loaded MEVs to a subject, a device for detecting MEVs or cargo-loaded MEVs in samples obtained from a subject, and a device for administering an additional therapeutic agent to a subject.

[0410] The kit can, optionally, include instructions. Instructions typically include a tangible expression describing the MEVs or cargo-loaded MEVs, and, optionally, other components included in the kit, and methods for administration, including methods for determining the proper state of the subject, the proper dosage amount, dosing regimens, and the proper administration method for administering the MEVs or cargo-loaded MEVs. Instructions also can include guidance for monitoring the subject over the duration of the treatment time.

[0411] Kits also can include a pharmaceutical composition described herein and an item for diagnosis. For example, such kits can include an item for measuring the concentration, amount or activity of the Cargo-loaded MEVs, in a subject.

[0412] In some examples, the MEVs or cargo-loaded MEVs are provided in a diagnostic kit for the detection of the MEVs or cargo-loaded MEVs or cargo in an isolated biological sample (e.g., tumor cells, such as circulating tumor cells obtained from a subject or tumor cells excised from a subject).

[0413] Kits provided herein also can include a device for administering the MEVs to a subject. Any of a variety of devices known in the art for administering medications to a subject can be included in the kits provided herein. Exemplary devices include, but are not limited to, a hypodermic needle, an intravenous needle, a catheter, a nebulizer, and an inhaler. Typically, the device for administering the compositions is compatible with the desired method of administration of the composition.

### 3. Administration of Endogenously Loaded MEVs and Routes of Administration

[0414] The cargo-loaded MEVs provided herein can be administered to a subject by any method or route known in the art for the administration of pharmaceuticals, including biologics. The cargo-loaded MEVs can be administered by routes. Routes of administration, include, but are not limited to, systemic, topical, and local administration. Routes of administration as discussed, include, oral administration, enteral administration, parenteral, which includes intradermal, intramuscular, intraperitoneal, intravenous, subcutaneous, and intracavity administration, topical, epidural, mucosal, which includes topical, intranasal, vaginal, vulvovaginal, esophageal, oroesophageal, bronchial, rectal, and pulmonary.

[0415] The cargo-loaded MEVs can be administered externally to a subject, at the site of the disease for exertion of local or transdermal action. Compositions containing the cargo-loaded MEVs can be administered, as discussed above by any route depending upon the target tissue or organ for the disease, disorder, or condition, treated. For targeting the spleen, for example, oral administration is employed. The MEVs for such administration are formulated as a liquid or solid as discussed above. As shown in the Examples, following oral administration, the MEVs pass through the stomach and into the intestines, and, as shown then are found in the spleen. This is a distinction and advantage of the MEVs compared to mammalian MEVs, which cannot be administered orally because they cannot survive the harsh conditions in the stomach. Administration can be by infusion, inhalation, by bolus injection, by absorption through epithelial or mucocutaneous linings (e.g., topical, oral, vaginal, rectal and intestinal mucosa).

[0416] Compositions containing the cargo-loaded MEVs can be administered alone and/or together with or sequentially with other biologically active agents. For example, the cargo-loaded MEVs are administered by infusion delivery, such as by infusion pump or syringe pump, and can be administered in combination with another therapeutic agent or as a monotherapy.

[0417] The method and/or route of administration can be altered to alleviate adverse side effects associated with administration provided herein. For example, if a patient experiences a mild or moderate (i.e., Grade 1 or 2) infusion reaction, the infusion rate can be reduced (e.g., reduced by 10%, 20%, 30%, 40%, 50%, 60%, 70%, 80%, 90% or more). If the patient experiences severe (i.e., Grade 3 or 4) infusion reactions, the infusion can be temporarily or permanently discontinued.

[0418] In some examples, if the subject experiences an adverse side effect, such as severe skin toxicity, for example severe acneiform rash, treatment adjustments can be made. For example, after the occurrence of an adverse side effect, administration can be delayed, such as for 1 to 2 weeks or until the adverse side effect improves. In some examples, after additional occurrences of an adverse side effect, the dosage can be reduced. A particular regimen and treatment protocol can be established by the skilled physician or other skilled practitioner in the art.

[0419] Appropriate methods for delivery, can be selected by one of skill in the art based on the properties of the dosage amount of the cargo-loaded MEVs or the pharmaceutical composition containing the cargo-loaded MEVs. Such properties include, but are not limited to, solubility, hygroscopicity, crystallization properties, melting point, density, viscosity, flow, stability, and degradation profile. As detailed in the Examples, the route of administration of the MEVs determines their biodistribution. As shown, following administration, the MEVs distribute in tissues and organs that differ from mammalian and other EVs.

### 4. Drug Delivery Systems

[0420] As discussed above, and demonstrated in the Examples, the MEVs and compositions containing the MEVs can be considered drug delivery systems in which the MEVs are formulated for a particular route of administration for targeting to an organ or tissue involved in a disease, disorder, or condition, that can be treated by the selected cargo. Drug delivery systems can optionally include additional components, such as another therapeutic agent for combination therapy and/or devices for administration.

[0421] A composition or drug delivery system, for example, contains extracellular vesicles (MEVs) formulated for oral delivery, intravenous delivery, intramuscular delivery, intranasal delivery, subcutaneous delivery, topical delivery, mucosal delivery, intraperitoneal delivery, intratumoral delivery, or inhalation delivery. The MEVs are isolated from the cell culture, cell culture medium, or genetically-modified microalgae cell, or produced by the methods as described herein. The MEVs are formulated for a route of delivery, whereby the endogenous cargo is delivered to a target organ or tissue. Target organs or tissues include lungs, liver, spleen, intestine, brain, spinal cord, peripheral nerves, lymphoid tissues, eyes, mucosal tissue, skin, hematopoietic tissues, pancreas, muscle, bones, heart, endocrine tissues and kidneys. The target organ or tissue is mucosal tissue can be is nasobuccal, ocular, urogenital, vaginal, or rectal. The drug delivery system can be formulated as a suspension or emulsion, which can be a nanoemulsion or is a microemulsion. The drug delivery system can be formulated as a tablet, capsules, gel capsule, powder, troche, granules, liquid for oral administration, oil, or is a suspension or emulsion for nasal administration or oral administration, or inhalation, or nebulization, or intratracheal administration.

[0422] As described above, exemplary of MEVs are Chlorella extracellular vesicles that contain heterologous (to the Chlorella microalgae) cargo that produce the MEVs with endogenously loaded bioactive molecule cargo by the genetically-modified microalgae cells that produced the MEVs. Chlorella species include, but are not limited to, Chlorella ellipsoidea, Chlorella pyrenoidosa, Chlorella sorokiniana, Chlorella vulgaris, and Chlorella variabilis.

[0423] The endogenous cargo can be a therapeutic for treating or preventing a disease, disorder, or condition, or treating or preventing a symptom thereof, such as, for example, the endogenous cargo comprises or encodes a protein a therapeutic that is a prophylactic for preventing or reducing the risk of getting a disease, disorder, or condition, or reducing the severity of a disease, disorder, or condition. The endogenous cargo comprises a nucleic acid, a protein, a small peptide, a peptide, and/or a polypeptide, with the provisos recited throughout the disclosure.

[0424] The cargo includes any described herein for endo-loading into the MEVs, and/or known to those of skill in the art. For example, the endogenous cargo for the drug delivery systems, as well as the compositions and MEVs described in the sections above and below, can comprise nucleic acid encoding an immunomodulatory agent to increase or decrease production of one or more cytokines; up- or down-regulate self-antigen presentation; mask MHC antigens; or promote the proliferation, differentiation, migration, or activation state of one or more types of immune cells. The endogenous cargo can comprise or encode a hormone or a cytokine or a chemokine; or comprises nucleic acid encoding a hormone, or a cytokine, or a chemokine. Exemplary thereof is one or more of a hormone or cytokine or growth factor selected from among human growth hormone; N-methionyl human growth hormone; bovine growth hormone; parathyroid hormone; thyroxine; insulin; proinsulin; relaxin; prorelaxin; glycoprotein hormones such as follicle stimulating hormone (FSH), thyroid stimulating hormone (TSH), and luteinizing hormone (LH); hepatic growth factors; fibroblast growth factors; prolactin; placental lactogen; tumor necrosis factor-alpha and -beta; Müllerian-inhibiting substance; gonadotropin-associated peptide; inhibin; activin; vascular endothelial growth factors; integrin; thrombopoietin (TPO); nerve growth factors, transforming growth factors (TGFs); insulin-like growth factor-I and -II; erythropoietin (EPO); osteoinductive factors; interferons such as interferon-alpha,-beta, and -gamma; colony stimulating factors (CSFs) such as macrophage-CSF (M-CSF); granulocyte-macrophage-CSF (GM-CSF); and granulocyte-CSF (G-CSF); or an interleukin (IL). The cargo can comprise for mRNA-mediated gene therapy, gene silencing, gene substitution, gene overexpression, and/or gene editing, can comprise one or more of peptides or proteins for gene regulation, gene substitution, gene overexpression, gene editing, regulation of cell metabolism, cell functions, and protein therapy. The mRNA-mediated gene therapy or protein therapy can be treating an inborn error of metabolism. The cargo can comprise a vaccine, such as a protein vaccine or mRNA vaccine. Vaccines, as described herein can be immunoprotective and/or prophylactic, and/or can treat a disease, disorder, or condition.

[0425] The MEV cargo can comprise a nucleic acid or protein or a nucleic acid encoding a protein that is a therapeutic product for treatment of cancer, or an infectious disease, or metabolic diseases, or a neurodegenerative disease or other CNS disorder, or aging, or an aging associated disease, or genetic diseases, or ophthalmic disorders, or immunological disorders, or involving internal organs urogenital organs, the cardiovascular system and associated organs and tissues, hematopoietic or lymphoid tissues, sensory organs and tissues, urogenital organs and tissues, muscle tissues, bones, and/or endocrine tissues. Internal organs include, for example, liver, or the pancreas, or spleen, or brain. The compositions and drug delivery systems that contain the MEVs can be formulated for oral administration, parenteral administration, topical administration, local administration, intratumoral administration, systemic administration, mucosal administration, intravenous administration, subcutaneous administration, intramuscular administration, intraperitoneal administration, transdermal administration, intranasal administration, inhalation, intratracheal administration. They can be formulated for oral delivery, or as an aerosol for intranasal, inhalation, or nebulization. The drug delivery systems and compositions provided herein can be used or delivering endogenous cargo in an MEV to an organ or tissue, wherein the mode of administration is selected to target the organ or tissue.

[0426] It is shown herein that the fate of administered MEVs is a function of the route of administration. MEVs have unique trafficking patterns, and provide an opportunity for targeted delivery of the loaded cargo. For example, MEVs can be delivered orally and, upon oral administration, they traffic through the GALT. Sections F and G detail biodistribution and delivery of cargo-loaded MEVs.

### 5. Combination Therapies

[0427] The cargo-loaded MEVs provided herein can be administered before, after, or concomitantly with one or more other therapeutic regimens or agents. The skilled medical practitioner can determine empirically, or by considering the pharmacokinetics and modes of action of the agents, the appropriate dose or doses of each therapeutic regimen or agent, as well as the appropriate timings and methods of administration. The additional therapeutic regimens or agents can improve the efficacy or safety or other properties of the cargo-loaded MEVs. In some examples, the additional therapeutic regimens or agents can treat the same disease or a comorbidity. In some examples, the additional therapeutic regimens or agents can ameliorate, reduce or eliminate one or more side effects known in the art or described herein that are associated with administration of the cargo-loaded MEVs or the cargo.

[0428] For example, the cargo-loaded MEVs described herein can be administered with chemotherapy, radiation therapy, or both chemotherapy and radiation therapy, or for anti-viral or anti-bacterial or other pathogen therapy, the cargo-loaded MEVs can be administered with other anti-pathogen therapeutics and treatments. The cargo-loaded MEVs can be administered in combination with one or more other prophylactic or therapeutic agents, including but not limited to antibodies, cytotoxic agents, chemotherapeutic agents, cytokines, growth inhibitory agents, anti-hormonal agents, kinase inhibitors, anti-angiogenic agents, cardio-protectants, immunostimulatory agents, immunosuppressive agents, agents that promote proliferation of hematological cells, angiogenesis inhibitors, protein tyrosine kinase (PTK) inhibitors, FcγRIIb or other Fc receptor inhibitors, or other therapeutic agents.

[0429] The one or more additional agents can be administered simultaneously, sequentially or intermittently with the cargo-loaded MEVs. The agents can be co-administered, for example, as part of the same pharmaceutical composition or same method of delivery. In some examples, the agents can be co-administered at the same time as the cargo-loaded MEVs, but by a different means of delivery. The agents also can be administered at a different time than administration of the cargo-loaded MEVs, but close enough in time to have a combined prophylactic or therapeutic effect. In some examples, the one or more additional agents are administered subsequent to or prior to the administration of the cargo-loaded MEVs separated by a selected time period. In some examples, the time period is 1 day, 2 days, 3 days, 4 days, 5 days, 6 days, 1 week, 2 weeks, 3 weeks, 1 month, 2 months, or 3 months. In some examples, the one or more additional agents are administered multiple times and/or the cargo-loaded MEVs provided herein are administered multiple times.

### F. Biodistribution of Mevs Following Administration Via Various Routes

### 1. Biodistribution of Mammalian EVs

[0430] Pharmacokinetics and biodistribution in organs and tissues of mammalian EVs have been extensively studied for their pharmacokinetics and distribution in organs and tissues (Vader et al. (2016) Advanced drug delivery reviews 106 (Pt A): 148-156, doi.org/10.1016/j.addr.2016.02.006; Morishita et al. (2017) Journal of pharmaceutical sciences 106 (9): 2265-2269, hdoi.org/10.1016/j.xphs.2017.02.030). Treatments with mammalian cell-derived EVs are generally based on intravenous or intraperitoneal routes of administration. Primary target organs upon systemic administration of mammalian EVs are the liver, spleen and lungs. A comprehensive study (see, Wiklander et al. (2015) J. Extracellular Vesicles 4:26316) of the tissue distribution of fluorescently-labelled mammalian EVs from various cell sources demonstrated that 24 hours after intravenous (i.v.) injection in mice, the highest fluorescence signal was in the liver, followed by spleen, gastrointestinal tract and lungs. Furthermore, cell source, EV dose, and route of administration was shown to affect EV distribution; for example, injection of higher EV doses resulted in relatively lower liver accumulation compared to lower doses, possibly caused by saturation of the mononuclear phagocyte system (MPS). Comparison between intraperitoneal (i.p.), subcutaneous (s.c.) and i.v. administrations showed that intraperitoneal and subcutaneous doses resulted in reduced EV accumulation in liver and spleen and enhanced pancreas and gastrointestinal tract accumulation compared to i.v. injections. Systemically administered EVs are reported to be rapidly taken up by the mononuclear phagocyte system (MPS), particularly in the liver and spleen. The mechanism of clearance resembles that described for synthetic nanoparticles, such as liposomes (Van der Meel et al. (2014) J. Control. Release 195:72-8). The majority of splenic accumulation is caused by EV storage in the spleen rather than uptake by the spleen (Lai C. P. et al. (2014) ACS Nano 8:483-494). Biodistribution of mammalian EVs following other routes of administration also has been investigated. For targeting of the central nervous system, intranasal administration of curcumin-loaded mammalian EVs resulted in EV localization in the brain. Drug levels peaked at 1 hour after administration, and a significant amount detected after 12 hours with no toxic effects observed (Zhuang et al. (2011) Mol. Ther. 19:1769-1779).

[0431] In general, mammalian EVs are not employed for oral delivery because of their low stability at various pH and temperatures, rapid degradation of biomolecules in the digestive tract, and the limitations of industrial scale production for oral dosing (Cheng et al. (2019) Protein Cell 10:295-299). The only exception so far are bovine milk-derived EVs, which upon oral delivery to mice have shown a pattern of distribution that, analyzed with whole-body in vivo imaging system (IVIS), included rapid accumulation in the intestine, where the EVs were detectable after 2 and 6 hours, followed by fluorescence signal observed in liver, spleen, lungs, kidney, heart, and the gastrointestinal tract at 24 hours. After 48 hours, the fluorescence signal subsided within most of the organs indicating the clearance of nanovesicles from the system (Samuel et al. (2021) Nat Commun 12:3950, doi.org/10.1038/s41467-021-24273-8). Thus, mammalian EVs (derived from sources other than milk) cannot be absorbed by the intestinal tract and from the intestines to become bioavailable in target organs (Zhong et al. (2021) Biomaterials. 277:121126. doi: 10.1016/j.biomaterials.2021.121126).

[0432] Treatments with mammalian cell-derived EVs generally employ intravenous or intraperitoneal routes of administration for systemic administration where the target organs are the liver, spleen and lungs. As noted, most mammalian EVs have not been employed for oral delivery due to their low stability at various pH and temperatures, rapid degradation of biomolecules in the digestive tract, and the limitations of industrial scale production for oral dosing (Cheng et al. (2019) Protein Cell 10 (4): 295-299). The only exception are bovine milk-derived EVs, which upon oral delivery to mice have shown a pattern of distribution that, analyzed with whole-body in vivo imaging system (IVIS), include rapid accumulation in the intestine, where the EVs were detectable after 2 and 6 hours, followed by fluorescence signal observed in liver, spleen, lungs, kidney, heart, and the gastrointestinal tract at 24-hour time point. After 48 hours, the fluorescence signal subsided within most of the organs indicating the clearance of nanovesicles from the system.

[0433] As shown herein in the Examples, and discussed below, MEVs have different properties from mammalian EVs. For example, they are stable in the harsh environment of the gastrointestinal tract compared to mammalian cell-derived EVs. Thus, the microalgae EVs, as described herein, are particularly suitable for oral administration and drug delivery, as well as other routes of delivery as described herein.

### 2. Microalgae EVs Biodistribution

[0434] It is shown herein that MEVs, including those provided herein from Chlorella, have properties that are distinct from mammalian EVs, including bovine milk EVs. For example, a striking difference, discussed below, is that the MEVs can be administered orally, and that the primary target is the spleen, likely the white pulp of the spleen (white spleen).

[0435] The MEVs provided herein can deliver a variety of bioactive molecules, such as RNAs, such as mRNA, siRNA, and miRNA; proteins; peptides; and small molecules, which can be exogenously or endogenously loaded. These include products such as tissue-specific products and/or disease specific products. As discussed below, each route can be used to target particular organs and treat particular diseases. The MEVs can be formulated for administration by each route. Thus, provided are compositions containing MEVs that are for treating particular disease and for particular routes of administration.

[0436] It is shown herein, the route of administration determines the fate of the MEVs, and that the ultimate location of the MEVs is a function of the route of administration. Targets and endpoints of the MEVs include, but are not limited to, the liver, spleen, lungs, the intestines, and brain. Routes of administration include, but are not limited to, respiratory (nose, lungs), oral (digestive), intravenous, central nervous system (CNS), and topical. The selection of route depends upon the ultimate target and the payload. It is shown herein that intranasal administration goes to the lungs, intratracheal via a spray goes to the lung(s), intravenous accumulates in the spleen and liver, oral (per Os) goes to the digestive tract and spleen. In contrast, mammalian EVs cannot be taken orally.

[0437] MEVs are readily internalized by human cells. For example, in vitro, when administered to cells in culture, such as A549 cells, at a ratio of MEV/cell of 1000/1, 93% of the cells internalized the MEVs, and this occurred within 24 to 48 hours after contacting the cells with the MEVs.

[0438] DIR-labeled MEVs were administered to mice via four routes: intranasal (IN), intratracheal (IT), intravenous (IV), and oral, and, by full-body imaging as a function of time, the fate of the MEVs was visualized for 3 days, followed by sacrificing the mice to harvest organs for study. As shown in the examples, intravenous administration targets the liver at about 4-12 hours following administration, and the spleen, appearing to be in the red pulp of the spleen (red spleen), at 10-30 hours. Oral administration targets the intestine and spleen. It is shown herein that the MEVs are orally available; they resist passage through the stomach, and reach the intestine at 0.5 hour to 4 hours, and then the spleen at 0.5 hour to 10 hours. Of interest is the route to the spleen; there are two possible routes to the spleen, via the blood (to red spleen), and via lymphocytes (to white spleen), which has implications for targeting and delivering cargo to the immune system, accumulating from 4 hours to 28 hours. This can be effected by internalization by lymphocytes that are activated and end up in the spleen where they multiply, and/or by lymphocytes that phagocytose the MEVs, which are not activated, and go to the white pulp of the spleen (white spleen) from where they are disseminated through the immune system.

### a. Oral Administration

[0439] Thus, orally ingested MEVs go into the intestine, then, as shown, end up in the spleen, likely the white spleen. The spleen is responsible for initiating immune reactions to blood-borne antigens, and for filtering foreign material and old or damaged red blood cells from the blood. These functions are performed by two different compartments in the spleen: the white spleen, and red spleen. The two compartments are vastly different in structure, vascular organization, and cellular composition (see, e.g., Cesta (2006) Toxicologic Pathology 34:455-465 for a review of the structure, function and histology of the spleen).

[0440] White blood cells, which are plentiful in the intestine, migrate to the white spleen. When ingested orally the MEVs can be internalized by intestinal cells and, as discussed below, including by intestinal lymphocytes, which carry the MEVs to the spleen. This is in contrast to mammalian vesicles, which cannot be administered orally. Thus, MEVs provide a delivery vehicle for agents for which the immune system is a target, such as for immune modulating cargo. As discussed above, the pathway to the white spleen can occur, for example, via activated lymphocytes and/or phagocytic lymphocytes. Lymphocytes can phagocytose the MEVs, and are homed to the spleen. The MEVs, unlike mammalian EVs, provide a way to orally deliver small molecule drugs and proteins and other therapeutics, such as nucleic acid therapeutics, that cannot be administered orally. In particular, orally administered MEVs provide a route for treatment of diseases, such as cancers and inflammatory diseases, in which the immune system is involved or in which the treatment can be effected by targeting the immune system. Such diseases include, but are not limited to, infectious disease, autoimmune diseases, cancers, prevention of organ transplant rejection. These diseases are treated by suppressing or augmenting the activity of immune cells.

### 1) Components of the Lymphatic System

[0441] The lymphatic system includes lymph, lymphatic vessels and lymphatic organs (see, discussion in Zgair et al., (2016) Targeting Immunomodulatory Agents to the Gut-Associated Lymphoid Tissue. In: Constantinescu C., Arsenescu R., Arsenescu V. (eds) Neuro-Immuno-Gastroenterology. Springer, Cham. (doi.org/10.1007/978-3-319-28609-9_14) and summarized below).

### Lymph

[0442] Lymph is a generally clear and colorless fluid that drains from the interstitium, and contains recovered fluids and plasma proteins, and also can contain lipids, immune cells, hormones, bacteria, viruses, cellular debris, and cancer cells.

### Lymphatic Vessels

[0443] The lymphatic system is the body's second circulatory system. The lymphatic system is a unidirectional, blind-ended and thin-walled system of capillary vessels where lymph is driven. Lymphatic capillaries drain in the afferent collecting vessels, which then pass through one or more gatherings of lymph nodes. Lymph fluid then passes through the efferent collecting vessels, larger trunks and then the lymphatic duct, which drain lymph to the systemic circulation. Primary lymphatic organs include the thymus gland and bone marrow, which produce mature lymphocytes, which identify and respond to antigens; secondary lymphatic organs include lymph nodes, spleen and mucosa-associated lymph tissues (MALT). Within the secondary lymphatic organs, lymphocytes initiate immune responses. MALTs are distributed throughout mucous membranes and provide a defensive mechanism against a wide variety of inhaled or ingested antigens. MALTs are categorized according to their anatomical location as: bronchus-associated lymphoid tissue (BALT), nasal-associated lymphoid tissue (NALT), salivary gland duct-associated lymphoid tissue (DALT), conjunctiva-associated lymphoid tissue (CALT), lacrimal duct-associated lymphoid tissue (LDALT) and gut-associated lymphoid tissue (GALT).

### Gut-Associated Lymphoid Tissue (GALT)

[0444] GALT is composed of effector and immune induction sites. Effector sites include lymphocytes distributed throughout the lamina propria (LP) and intestinal epithelium; induction sites involve tissues, such as mesenteric lymph nodes (MLN), PP and smaller isolated lymphoid follicles (ILF). Mesenteric lymph nodes (MLN), which occur in the base of the mesentery, are the largest gatherings of lymph nodes in the body. The structure of MLN is divided into two regions: the medulla and cortex. The cortex primarily is composed of T-cell areas and B-cell follicles. Within the T-cell area, circulating lymphocytes enter the lymph node, and dendritic cells (DC) present antigens to T-cells. Lymph (containing cells, antigens and chylomicrons) is collected from the intestinal mucosa and reaches the MLN via the afferent lymphatics. Lymph fluid subsequently leaves the MLN through efferent lymphatics to reach the thoracic duct that drains to the blood.

[0445] Peyer's patches (PP) are a collection of lymphoid nodules distributed in the mucosa and submucosa of the intestine. They contain a sub-epithelial dome area and B-cell follicles dispersed in a T-cell area. A single layer of epithelial cells, called follicle-associated epithelium (FAE), separates lymphoid areas of PP from the intestinal lumen. FAE is permeated by specialized enterocytes called microfold (M) cells. These cells are a gate for the transport of luminal antigens to PP.

[0446] Isolated lymphoid follicles (ILF) are a combination of lymphoid cells in the intestinal LP. ILF are composed of germinal centers covered by FAE containing M-cells. ILF is a complementary system to PP for the induction of intestinal immunity.

[0447] GALT is the largest lymphatic organ in the human body and contains more than half of the body's lymphocytes. GALT is exposed to more antigens in the form of commensal bacteria and alimentary antigens, in addition to those from invasive pathogens, than any other part of the body. Intestinal lymphatic transport avoids hepatic first-pass metabolic loss by diverting the absorption of lipophilic drugs towards intestinal lymphatics rather than the portal vein. The intestinal immune system must distinguish antigens that require a protective immune response and develop a state of immune hypo-responsiveness (oral tolerance) for harmless antigens. This is effected by sampling of luminal antigens in the intestinal epithelium by DC. Antigens can cross the epithelium through M-cells, which are specialized epithelial cells of the follicle-associated epithelium of the GI tract. The antigens interact with DC in the underlying sub-epithelial dome region. Antigens are presented to local T-cells in PP by DC.

[0448] DC also migrate to the draining MLN where they present antigens to local lymphocytes. Alternative pathways for antigen transport across the intestinal epithelial cells involve receptor-mediated transport, and direct sampling from the lumen by DC projections. Antigen-loaded DC then migrate to the MLN through afferent lymphatics where they present antigens to T-cells. Subsequently, differentiated lymphocytes migrate from MLN through the thoracic duct and blood stream and eventually accumulate in the mucosa for an appropriate immune response.

### 2) Targeting GALT

[0449] Orally administered MEVs can target gut-associated lymphoid tissue (GALT). Thus, GALT is a target (effective compartment) and/or a route through which MEVs and their therapeutic agent cargo can be used to deliver cargo to organs, tissues, and/or systemic circulation. GALT is an advantageous target for various pharmacological agents such as, for example, immunomodulators, chemotherapeutic agents, anti-infective agents. The lymphatic system is a main pathway for intestinal and other tumor metastases; therefore, targeting cytotoxic drugs to the intestinal lymphatics can be used to treat tumor metastases. GALT is a delivery target for antiviral agents, as some viruses, such as, for example, human immunodeficiency virus (HIV), morbillivirus, canine distemper virus, severe acute respiratory syndrome (SARS)-associated coronaviruses, hepatitis B and hepatitis C, spread and develop within the lymphatic system.

[0450] Thus, MEVs, including the Chlorella MEVs exemplified herein, can be used to target immune cells upon oral delivery. As described above, the microalgae MEVs show a distinct pattern of biodistribution when administered orally. This pattern includes initial intestine accumulation followed by targeting the spleen, where they are detectable up to 24 hours (see, e.g., FIG. 3).

[0451] Since the microalgae MEVs are delivered to the spleen, the mechanism of this delivery can be based on cells of the immune system. Immune cells are abundant in the single-cell layer of intestinal epithelium and underlying lamina propria of the gut-associated lymphoid tissue (GALT). The immune cells include, T cells, plasma cells, mast cells, dendritic cells, and macrophages (Luongo et al. (2009) Current perspectives. International Reviews of Immunology 28 (6): 446-464, doi.org/10.3109/08830180903236486). Macrophages, dendritic cells, neutrophils, and also B cells perform phagocytosis. The immune cells in the gut, thus, can phagocytose the MEVs to deliver them to the spleen. After phagocytosis, the fate of the MEV cargo can depend upon the type of cargo. For example, macrophage and dendritic cells participate in antigen presentation, and present proteins delivered in the MEVS, or the products in the MEVs can be secreted, or the products, such RNA, can be translated.

[0452] Immune cells present in the intestinal epithelium and lamina propria of the intestine migrate to the spleen and back to the intestine. This homing to the spleen can be involved in MEV transfer from the gut to secondary lymphatic organs, especially to the spleen. T cells exhibit a specific lymphocyte recirculation pathway (Mackay et al. (1990) J Exp Med 171:801-17) that can be part of MEV trafficking to the spleen upon oral delivery. Therefore, cells of the immune system are targeted by orally-administered MEVs, and this phenomenon contributes to MEV localization in the spleen within hours post-administration.

[0453] As shown herein, upon oral administration the MEVs go to the intestine and then migrate to the spleen. The route to the spleen can be via absorption into the blood and/or by internalization by immune cells in the intestine. The blood route is an unlikely route, because the MEVs then would appear in the liver as shown for intravenous administration. When MEVs are administered intravenously they primarily reach the liver (massively) and to a much lesser extent the spleen. It is shown herein that clearance of the MEVs from the spleen follows different kinetics depending upon their origin (oral or IV). The migration to the spleen following oral administration therefore uses a different pathway from the MEVs administered intravenously. When MEVs are administered by mouth, they reach the spleen after having passed through the intestine. These results indicate that the MEVs are located in “different compartments” inside the spleen, depending on the route of arrival: either from the intestine or from the blood. As discussed, upon oral administration, the likely route is that the MEVs in the intestine are internalized by lymphocytes present in the GALT, and that the subsequent migration of the MEVs from the intestine/GALT to the spleen occurs because the MEVs are transported by the lymphocytes. Coming from the intestine/GALT, the MEVs end up in the white spleen compartment. Thus, the MEVs provide a way to deliver cargo to different organs from mammalian EVs, which cannot be administered orally.

### 3. Diseases and Conditions Treated by MEVs

[0454] Based upon the targeted organs, a variety of diseases and disorders can be treated by MEVs. The MEVs can be loaded or produced to contain therapeutic agents for treating these diseases and conditions. The appropriate route of administration for the targeted organ and disease is selected. For example, for targeting the spleen and intestines, oral administration is selected; and for targeting the lungs, inhalation or nasal administration is selected. Based on the biodistribution and pharmacokinetic data the following organs can be targeted to treat diseases exemplified as follows. liver: cancer, cancer metastases, metabolic syndrome, genetic disorders (delivery of gene therapy), alpha-anti-trypsin (AAT) deficiency and other inborn errors of metabolism, hemophilia, hypercholesterolemia, liver inflammation, steatohepatitis, and other diseases and disorders that can be treated by delivery of a therapeutic to the liver;

[0455] spleen: diseases treated by immune modulation, including cancers, and immune cell disorders, and cancer, and other diseases that can be treated by administration to the spleen, particularly by immune cells that occur in or traffic to the white spleen;

[0456] intestine: diseases and disorders treated or prevented by vaccines, intestinal infections, microbiota modulation, Crohn's disease, cancer, ulcers, diseases treated by orally administered drugs, such as small molecules and proteins, and other such diseases, disorders, and conditions; and

[0457] lungs: infectious diseases, particularly respiratory diseases, chronic obstructive pulmonary disease (COPD), pulmonary hypertension, asthma, other inflammatory lung diseases, cystic fibrosis, ATT-deficiency, lung disease, cancer, cancer metastases, and other such diseases and disorders.

### G. Formulations, Routes of Administration, and Disease and Disorders

[0458] Provided are compositions containing the MEVs in an amount suitable for effecting treatment for a particular disease or disorder. The amount can depend upon the therapeutic cargo, the disease, or disorder, and the subject treated. It is within the level of skill in the art to ascertain a particular dosage of MEVs. Formulations include any known to those of skill and include, for example:
[0459] injectables for intravenous administration, to reach the liver and the spleen;
[0460] oral, such as, for example tablets, capsules, films, and troches;
[0461] drops for per os administration, to reach the intestine, such as a vaccine, the immune system (immune cells), and the spleen;
[0462] compositions, such as emulsions (microemulsions and nanoemulsions) for inhalation, such for intratracheal, intrapulmonary administration; to reach the lungs;
[0463] drops for intranasal administration; and
[0464] formulations, such as creams, oils, gels, lotions, ointments for the skin and the mucosa.

[0465] Provided are pharmaceutical compositions containing, in a pharmaceutically acceptable vehicle microalgae extracellular vesicles (MEVs). The MEVs can contain an agent, generally a therapeutic or biologically active agent, such as nucleic acid, particularly an RNA, a protein, a small molecule, and other such agents. The compositions contain an amount of the MEV that can be diluted to deliver a therapeutically effective amount of the agent, or are formulated for direct administration without dilution. The particular concentration of MEVs depends upon a variety of parameters within the skill of a skilled artisan, including, for example, the treated indication; the active agent; the route of administration; the disease, disorder, or condition to be treated; and the regimen. Routes of administration include systemic and local routes, oral, rectal, intravenous, intramuscular, subcutaneous, mucosal, inhalation, nasal, eye, peritoneal, intratracheal, intravitreal, vaginal, and any suitable route known to the skilled person.

[0466] Pharmaceutical carriers or vehicles suitable for administration of the compounds provided herein include any such carriers known to those skilled in the art to be suitable for the particular mode of administration.

### Exemplary Formulations

[0467] Pharmaceutical compositions containing the MEVS can be formulated in any conventional manner, by mixing a selected amount of the active compound with one or more physiologically acceptable carriers or excipients. Selection of the carrier or excipient is within the skill of the administering professional, and can depend upon a number of parameters. These include, for example, the mode of administration (i.e., systemic, oral, nasal, pulmonary, local, topical, or any other mode), and the disorder treated. The formulations also can be co-formulations with other active agents for combination therapy.

[0468] A selected amount of MEVs are formulated in a suitable vehicle for administration by a selected route. The pharmaceutical compositions can be formulated in any conventional manner, by mixing a selected amount of MEVs with one or more physiologically acceptable carriers or excipients or vehicles. The pharmaceutical composition can be used for therapeutic, prophylactic, cosmetic and/or diagnostic applications. The concentration of the MEVs in a composition, depends on a variety of factors, including those noted above, as well as the absorption, inactivation, and excretion rates of the active agent cargo, the release of the cargo, the mechanism of release, the dosage schedule, and the amount administered, the age and size of the subject, as well as other factors known to those of skill in the art, and related to the properties of the MEVs.

[0469] The pharmaceutical compositions provided herein can be in various forms, such as, but not limited to, in solid, semi-solid, liquid, emulsions, powder, aqueous, and lyophilized forms. The pharmaceutical compositions provided herein can be formulated for single dosage (direct) administration, or for dilution, or other regimen. The concentrations of the compounds in the formulations are effective, either following dilution or mixing with another composition, or for direct administration, for delivery of an amount, upon administration, that is effective for the intended treatment. The compositions can be formulated in an amount for single or multiple dosage direct administration. The form of composition depends on a variety of factors, including the intended mode of administration. The resulting mixtures are solutions, suspensions, emulsions and other such mixtures, and can be formulated as creams, gels, ointments, emulsions, solutions, lotions, suspensions, tinctures, pastes, foams, aerosols, irrigations, and sprays. For oral administration, the MEVs can be formulated as tablets, capsules, lozenges, liquids, and others.

[0470] For local internal administration, such as intramuscular, parenteral or intra-articular administration, the MEVs can be formulated in isotonically buffered saline. The effective concentration of the MEVs is sufficient to provide a sufficient amount of the cargo agent for the intended purpose, and can be empirically determined.

[0471] Generally, pharmaceutically acceptable compositions are prepared in view of approvals for a regulatory agency, or other agency, and/or are prepared in accordance with generally recognized pharmacopeia for use in animals and in humans. Pharmaceutical compositions can include a carrier, such as a diluent, adjuvant, excipient, or vehicle, with which a polypeptide is administered. Such pharmaceutical carriers can be sterile liquids, such as water and oils, including those of petroleum, animal, vegetable or synthetic origin, such as peanut oil, soybean oil, mineral oil, and sesame oil. Water is a typical carrier when the pharmaceutical composition is administered intravenously. Saline solutions and aqueous dextrose and glycerol solutions also can be employed as liquid carriers, particularly for injectable solutions. Compositions can contain, along with an active ingredient, a diluent, such as lactose, sucrose, dicalcium phosphate, and carboxymethylcellulose; a lubricant, such as magnesium stearate, calcium stearate and talc; and a binder, such as starch, natural gums, such as gum acacia, gelatin, glucose, molasses, polyvinylpyrrolidone, celluloses and derivatives thereof, povidone, crospovidone, and other such binders known to those of skill in the art. Suitable pharmaceutical excipients include starch, glucose, lactose, sucrose, gelatin, malt, rice, flour, chalk, silica gel, sodium stearate, glycerol monostearate, talc, sodium chloride, dried skim milk, glycerol, propylene glycol, water, and ethanol. A composition, if desired, also can contain minor amounts of wetting or emulsifying agents, or pH buffering agents, for example, acetate, sodium citrate, cyclodextrin derivatives, sorbitan monolaurate, triethanolamine sodium acetate, triethanolamine oleate, and other such agents. These compositions can take the form of solutions, suspensions, emulsions, tablets, pills, capsules, powders, granules, and sustained release formulations. Capsules and cartridges of, e.g., gelatin, for use in an inhaler or insufflator, can be formulated containing a powder mix of a therapeutic compound and a suitable powder base, such as lactose or starch. A composition can be formulated as a suppository, with traditional binders and carriers, such as triglycerides. Oral formulations can include standard carriers, such as pharmaceutical grades of mannitol, lactose, starch, magnesium stearate, sodium saccharine, cellulose, magnesium carbonate, and other such agents. Preparations for oral administration also can be suitably formulated with protease inhibitors, such as a Bowman-Birk inhibitor, a conjugated Bowman-Birk inhibitor, aprotinin and camostat. Examples of suitable pharmaceutical carriers are described in “Remington's Pharmaceutical Sciences” by E. W. Martin. Such compositions will contain a therapeutically effective amount of the compound, generally in purified form, together with a suitable amount of carrier, so as to provide the compound in a form for proper administration to a subject or patient.

[0472] The pharmaceutical compositions provided herein can contain other additives, including, for example, antioxidants, preservatives, antimicrobial agents, analgesic agents, binders, disintegrants, colorings, diluents, excipients, extenders, glidants, solubilizers, stabilizers, tonicity agents, vehicles, viscosity agents, flavoring agents, emulsions, such as oil-in-water or water-in-oil emulsions, emulsifying and suspending agents, such as acacia, agar, alginic acid, sodium alginate, bentonite, carbomer, carrageenan, carboxymethylcellulose, cellulose, cholesterol, gelatin, hydroxyethyl cellulose, hydroxypropyl cellulose, hydroxypropyl methylcellulose, methylcellulose, octoxynol-9, oleyl alcohol, povidone, propylene glycol monostearate, sodium lauryl sulfate, sorbitan esters, stearyl alcohol, tragacanth, xanthan gum, and derivatives thereof, solvents, and miscellaneous ingredients, such as crystalline cellulose, microcrystalline cellulose, citric acid, dextrin, dextrose, liquid glucose, lactic acid, lactose, magnesium chloride, potassium metaphosphate, and starch, among others (see, generally, Alfonso R. Gennaro (2000) Remington: The Science and Practice of Pharmacy, 20th Edition. Baltimore, MD: Lippincott Williams & Wilkins). Such carriers and/or additives can be formulated by conventional methods and can be administered to the subject at a suitable dose. Stabilizing agents, such as lipids, nuclease inhibitors, polymers, and chelating agents, can preserve the compositions from degradation within the body.

[0473] The formulation should suit the mode of administration. For example, the MEVs can be formulated for parenteral administration by injection (e.g., by bolus injection, or continuous infusion). The injectable compositions can take such forms as suspensions, solutions or emulsions in oily or aqueous vehicles. The sterile injectable preparation also can be a sterile injectable solution, or a suspension in a non-toxic parenterally-acceptable diluent or solvent, for example, as a solution in 1,4-butanediol. Sterile, fixed oils are conventionally employed as a solvent or suspending medium. For this purpose, any bland fixed oil can be employed, including, but not limited to, synthetic mono- or diglycerides, fatty acids (including oleic acid), naturally occurring vegetable oils, such as sesame oil, coconut oil, peanut oil, cottonseed oil, and other oils, or synthetic fatty vehicles like ethyl oleate. Buffers, preservatives, antioxidants, and the suitable ingredients, can be incorporated as required, or, alternatively, can comprise the formulation. The MEVs provided herein, can be formulated as the sole pharmaceutically active ingredient in the composition, or can be combined with other active ingredients. Suspension of the MEVs can be suitable for administration. These can be prepared according to methods known to those skilled in the art.

[0474] Suitable compositions for intranasal administration include but are not limited to, powders, sprays, liquids, suspensions, emulsions, and any other form that can be administered directly to the nose and that can contain the MEVs. The concentration of MEVs can be empirically determined, and depends upon the cargo, the indication treated, or intended use.

[0475] The therapeutical concentration of the MEVs can be determined empirically by testing the compounds in known in vitro and in vivo systems. Determination of a therapeutically effective amount is well within the capability of those skilled in the art.

### H. Biodistribution and Delivery of Mevs to the Brain Via Intranasal (in) Administration for Treating Diseases, Disorders, and Conditions of the Brain and Cns

[0476] As discussed throughout the disclosure herein, MEVs provide numerous advantages for delivery of bioactive molecules, including therapeutic and diagnostic or detectable molecules, compared to other vehicles, including EVs from other sources, including plant sources (see discussion in the section below, and throughout the disclosure). In particular, as described and shown herein, the MEVs can be administered intranasally, and traffic via unique pathways to areas of interest in the brain. The MEVs can be loaded with cargo that includes nucleic acids, such as plasmids, anti-sense oligonucleotides (ASO), mRNA, lncRNA, siRNA, miRNA, and other RNAs, peptides including proteins/peptides/polypeptides, small molecules, drugs, diagnostic agents, and other molecules. MEVs can serve as vectors to the brain of pharmacologically active compounds with poor stability in gastrointestinal fluids, poor intestinal absorption and/or extensive hepatic first-pass elimination, such as polar drugs.

[0477] Administration of MEVs by IN administration provides for transporting drugs that act in the brain, such as, for example, anti-depressants, antipsychotics, anxiolytics, memory enhancers, agents for treatment of dementia, and agents for treatment of cancers, to target cells where their effects are manifested, without general distribution in the body that can occur by systemic, such as intravenous, or by oral administration. MEVs provide a non-invasive solution for delivering drugs targeted for CNS and brain diseases, disorders, and conditions. MEVs can deliver molecules that are unable to cross the blood-brain barrier (BBB). For hydrophilic compounds, access to the brain is restricted by the BBB which does not allow the transfer from the vascular compartment to the brain tissue. IN administration also can deliver molecules that are not able to reach the brain after first-pass metabolism.

### 1. Brain Structure

[0478] In view of the findings described and exemplified herein regarding biodistribution of MEVs in the brain (see, e.g., the working examples and accompanying figures) the following brain areas/nuclei are of interest in view of their recognized involvement in brain diseases, disorders, and conditions, including psychiatric and neurologic disorders, and major functions of the central nervous system.

### a. Anterior Olfactory Nucleus

[0479] The anterior olfactory nucleus refers to the most rostral group of nerve cells that receive input from the olfactory bulb. In the human and the macaque they form small groups scattered within the olfactory tract from the olfactory bulb through the olfactory peduncle to a much larger group on the dorsal surface of the tract on the underside of the orbital gyri. It is composed of several subgroups, which are defined by topology.

[0480] The anterior olfactory nucleus is located posterior to the olfactory bulb in the olfactory peduncle. It is one of the major olfactory processing centers; the olfactory bulb is its major afferent input and also is the principal target of its axons. The anterior olfactory nucleus (AON) is the initial recipient of odor information from the olfactory bulb, and the target of dense innervation conveying spatiotemporal cues from the hippocampus. Episodic and contextually-relevant odor engrams are stored within the AON; its activity is necessary and sufficient for the behavioral expression of odor memory.

### b. Tenia Tecta

[0481] The tenia tecta refers to a continuation ventrally of the supracallosal gyrus beyond the rostrum of the corpus callosum (see, e.g.,

URL:/braininfo.rprc.washington.edu/centraldirectory.aspx?ID=1870). In the human and the macaque it lies on the rostral surface of the lamina terminalis and is considered identical to or part of the paraterminal gyrus. In the rat and the mouse it is located similarly in relation to the supracallosal gyrus; it is a more prominent layered structure that extends rostrally on the medial surface overlying the anterior olfactory nucleus. It is considered part of the olfactory areas (rodent) of the cerebral cortex. In rodents it consists of two parts, the dorsal tenia tecta and the ventral tenia tecta. The ventral tenia tecta (vTT) is a component of the olfactory cortex and receives both bottom-up odor signals and top-down signals. Tenia tecta (vTT), an area of the olfactory cortex located in the ventromedial aspect of the olfactory peduncle, transforms the perception of odor signals into reward-directed behaviors.

### c. Olfactory Tubercle

[0482] The olfactory tubercle refers to a predominantly cellular structure defined on the basis of a Nissl stain. It is located on the ventral surface of the endbrain caudal to the anterior olfactory nucleus, medial to the olfactory tract, rostral to the piriform area and ventral to the nucleus accumbens and substantia innominata. It contains some of the islands of Calleja.

[0483] In humans the olfactory tubercle is not very developed; it is barely distinguishable from the overlying nucleus accumbens. In the macaque it is somewhat more prominent and bounded medially by the tenia tecta. In primates it does not protrude from surrounding areas and is penetrated by numerous small blood vessels. These give it the appearance on dissection that accounts for the name ‘anterior perforated substance’ in human neuroanatomy. The location in the rat and the mouse is the same as in the macaque. It protrudes on the rostroventral surface of the endbrain where it is more clearly stratified and much larger in proportion to the size of the brain than in primates. It is involved in the proper sense of smell.

### d. Piriform Cortex

[0484] Primary olfactory cortex or Piriform Cortex is located in the temporal lobe. The piriform cortex (PC) is a key brain area involved in processing and coding of olfactory information. It is implicated in various brain disorders, such as epilepsy, Alzheimer's disease, and autism. The PC consists of the anterior (APC) and posterior (PPC) parts, which are different anatomically and functionally.

[0485] The piriform cortex (PC) is located in the ventrolateral region of the forebrain and extends broadly along the anterior to posterior (AP) axis in mammals. As one of the primary olfactory cortex, the PC is involved in encoding odor identification (Gottfried et al. (2006) Neuron 49:467-479; Howard et al. (2009) Nature Neuroscience 12:932-938; Wilson et al. (2011) Neuron 72:506-519; Bekkers et al. (2013) Trends in Neuroscience 36:429-438; Courtiol et al. (2017) Perception 46 (3-4): 320-332, doi.org/10.1177/0301006616663216), odor-associated values or contexts (Gottfried et al. (2003) Neuron 39:375-386; Calu et al. (2007) In: Cerebral cortex (New York, N.Y.: 1991) 17:1342-1349, Roesch et al. (2007) In: Cerebral cortex (New York, N.Y.: 1991) 17:643-652), and odor memory (Zelano et al. (2011) Neuron 72:178-187; Strauch et al. (2018) Cerebral Cortex 28:764-776).

[0486] The PC also is implicated in various neurological disorders, such as epilepsy (Loscher et al. (1996) Progress in Neurobiology 50:427-481; Vismer et al. (May 2015) Front. Neural Circuits, 29, doi.org/10.3389/fncir.2015.00027; Young et al. (2019) Experimental Neurology 320:113013), Alzheimer's disease (Samudralwar et al. (1995) Journal of the Neurological Sciences 130:139-145; Saiz-Sanchez et al. (2015) Brain Struct Funct 220:2011-2025.,doi.org/10.1007/s00429-014-0771-3), autism spectrum disorder (Menassa et al. (2018) Neuroscience Letters 665:86-91; Koehler et al. (2018) Chemical Senses 43:627-634), and Parkinson's disease (Wu et al. (2011) Human Brain Mapping 32:1443-1457).

### e. Amygdala

[0487] Social behaviors are disrupted in several psychiatric disorders. The amygdala is a key brain region involved in social behaviors, and amygdala pathology has been implicated in disease states ranging from social anxiety disorder to autism. Frequently implicated in psychotic spectrum disorders, the amygdala serves as a hub for elucidating the convergent and divergent neural substrates in schizophrenia and bipolar disorder, the two most studied groups of psychotic spectrum conditions.

### f. Entorhinal Cortex

[0488] Entorhinal cortex (EC) relays object-related and spatial information from the perirhinal and parahippocampal cortices (PRC, PHC) to the hippocampus (HC). The entorhinal cortex projects weakly to the basal nucleus. Efferent fibers from the entorhinal cortex pass through the lateral nucleus, but it is not clear if the fibers form synapses or terminal plexuses within the nucleus. The projection from the amygdala to the entorhinal cortex arises primarily from the lateral nucleus and is most robust passing to anterior portions of the cortex. Unlike its projections to other areas of cortex, the basal nucleus contributes only a weak projection to entorhinal cortex. Two-thirds of all cortical projections to the hippocampus are relayed through the entorhinal cortex. It is not known if the entorhinal cortex provides the same information to the amygdala as it does to the hippocampus.

[0489] The entorhinal cortex is located in the mesial temporal lobe and acts as the interface between the hippocampus and the neocortex. It has been considered part of the hippocampal formation. It occupies the middle portion of the medial temporal region and includes part of the parahippocampal gyrus and gyrus ambiens 2. It is increasingly defined by its connectivity to the hippocampus.

### g. Frontal Cortex

[0490] The frontal cortex (FC) is the cerebral cortex covering the front part of the frontal lobe. This brain region is implicated in planning complex cognitive behavior, personality expression, decision making, and moderating social behavior. The basic activity of this brain region is orchestration of thoughts and actions in accordance with internal goals. Functions carried out by the frontal cortex area are referred to as executive functions.

### h. Striatum: Caudate Nucleus and Putamen

[0491] Two subcortical nuclei within the basal ganglia, the bilateral caudate nucleus and bilateral putamen, form the striatum. The caudate nucleus primarily is involved with emotion regulation, reward processing, decision making and executive functioning, while the putamen is primarily associated with the planning and production and purification, from the regulatory perspective, independent dossiers implementation of motor functions. Because of the strategic location and connectivity of the caudate nuclei and the putamen within frontostriatal circuits, morphological changes to these nuclei have been linked to the clinical functioning of patients with Parkinson's disease

### i. Nucleus Accumbens

[0492] Nucleus accumbens is considered as a neural interface between motivation and action, having a key-role in food intake, sexual behavior, reward-motivated behavior, stress-related behavior and substance-dependence. It is involved in several cognitive, emotional and psychomotor functions, altered in some psychopathology. Moreover it is involved in some of the most common and most severe psychiatric disorders, such as depression, schizophrenia, obsessive-compulsive disorder and other anxiety disorders, as well as in addiction, including drug abuse, alcoholism and smoking. Nucleus accumbens has also a role in other psychiatric disorders such as bipolar disorder, attention deficit/hyperactivity disorder and post-traumatic stress disorder. Nucleus accumbens deep brain stimulation has been also associated with antidepressant and anxiolytic effect, as well as quality of life improvement in patients suffering from severe resistant depression. Finally, nucleus accumbens deep brain stimulation has been proved beneficial for all phenotypic components of the Tourette syndrome, with remarkable reduction of the syndrome's motor manifestations, including tics.

### j. Thalamus

[0493] The thalamus is concerned in the higher nervous functions such as language, cognition, memory and intelligence. Severe nerve cell loss with proliferation of hypertrophic astroglia is observed in the association nuclei and sensory relay nuclei in the thalami of patients suffering from Creutzfeldt-Jakob disease. In a brain imaging study, volume reduction of the thalamus, especially of dorsomedial nuclei, and degradation of glucose metabolism were observed in the thalami of patients with schizophrenia. Schizophrenia has been considered to be a subcortical neurotransmitter imbalance syndrome. Schizophrenia has been described as a misconnection syndrome or cognitive dysmetria induced by dysfunction of the cortico-cerebellar-thalamic-cortical circuit (CCTCC).

### k. Hypothalamus

[0494] The hypothalamus is responsible for the control of important and vital functions by the release of several hormones such as CRH (corticotropin-releasing hormone), TRH (thyrotropin-releasing hormone), GnRH (gonadotropin-releasing hormone or luteinizing-releasing hormone, oxytocin, vasopressin, somatostatin (growth hormone-inhibiting hormone, GHIH), and GHRH (growth hormone-releasing hormone), which are responsible among others for the control of body temperature regulation, maintaining daily physiological cycles, controlling appetite, managing sexual behavior and regulating emotional responses.

### I. Substantia Nigra Pars Compacta

[0495] Pathologically, Parkinson's disease is characterized by the loss of dopaminergic neurons in the pars compacta of the substantia nigra.

### m. Hippocampus

[0496] The hippocampus has a pivotal role in learning and in the formation and consolidation of memory and is critically involved in the regulation of emotion, fear, anxiety, and stress. Studies of the hippocampus have been central to the study of memory in humans. The hippocampus is a model for the study of neuroplasticity as many examples of synaptic plasticity such as long-term potentiation and depression have been identified and demonstrated in hippocampal circuits.

### n. Colliculus

[0497] The extensive connections of the superior colliculus make it a major center for initiating eye movements and coordinating them with movements of the head and neck. The superficial layers of the superior colliculus contain a retinotopic map of the environment and the deeper layers contain premotor neurons with connections to networks that generate saccades and head movements. The auditory, somatosensory and visual signals that converge on the superior colliculus move the eyes, head and body to direct the line of sight towards objects of interest for orienting behavior.

### o. Pontine Raphe Nuclei

[0498] Raphe nuclei are characterized by high content in serotonin (5HT). They are responsible for the release of 5HT to other parts of the brain. Selective serotonin reuptake inhibitor (SSRI) drugs, for example, are thought to act on the raphe nucleus for achieving their antidepressant action.

### 2. The Blood-Brain Barrier

[0499] Drug development for central nervous system (CNS) diseases and psychiatric disorders is challenging due to the side effects of drugs, the complexity of the brain, and notably, the lack of efficient strategies to deliver drugs across the blood-brain barrier (BBB). The blood-brain barrier (BBB) restricts drug access to the brain, limiting the lipophilic drugs. In this context, development of molecules for delivery to the brain is challenging because of: (1) the design of active molecules, according to structure-activity rules discovered from 3D models, crystal structure of the target, in agreement with Lipinski's rule of five (Lipinski (2004) Drug Discovery Today: Technologies 1 (4): 337-34), which describes molecular properties important for a drug's pharmacokinetics in the human body; and (2) the specific constraints imposed by the BBB, which requires optimization of the permeation of molecules across the BBB, which in turn depends on molecular weight, lipophilicity, H bond donors and acceptors, charge, and polar surface area.

[0500] These problems can be solved by IN delivery of the MEVs, which bypass or are not restricted by the BBB. The blood-brain barrier (BBB) is formed by endothelial cells at the level of the cerebral capillaries. These endothelial cells interact with perivascular elements such as basal lamina and closely associated astrocytic end-feet processes, perivascular neurons (represented by an interneuron in FIG. 12A) and pericytes to form a functional BBB. Cerebral endothelial cells are unique in that they form complex tight junctions (TJ) produced by the interaction of several transmembrane proteins that effectively seal the paracellular pathway (FIG. 12B). These complex molecular junctions make the brain practically inaccessible for polar molecules, unless they are transferred by transport pathways of the BBB that regulate the microenvironment of the brain. There also are adherens junctions (AJ), which stabilize cell-cell interactions in the junctional zone. In addition, the presence of intracellular and extracellular enzymes such as monoamine oxidase (MAO), Y-glutamyl transpeptidase (Y-GT), alkaline phosphatase, peptidases, nucleotidases and several cytochrome P450 enzymes endow this dynamic interface with metabolic activity. Large molecules such as antibodies, lipoproteins, proteins and peptides can be transferred to the central compartment by receptor-mediated transcytosis or non-specific adsorptive-mediated transcytosis. Included are proteins, are receptors for insulin, low-density lipoprotein (LDL), iron transferrin (Tf), and leptin, that are involved in transcytosis. Others include, for example the multidrug resistance-associated protein family, such as P-glycoprotein.

[0501] Soluble molecules can cross the BBB via different mechanisms. Several lipid-soluble molecules can enter the brain by passive diffusion. In this mechanism, the molecule lipophilicity generally defines the penetration rate and extent into the brain. Many of these molecules are usually pumped back to the circulatory system by some efflux pumps expressed in the BBB. Small polar molecules, such as amino acids, glucose, nucleosides, and organic anions and cations, are transported by carrier-mediated transport. Another mechanism is receptor-mediated transcytosis, which transports large molecules, such as iron Tf, insulin, and leptin. Similar to Lipinski's rule of five, the permeation of a molecule across the BBB depends on its molecular weight, lipophilicity, H bond donors and acceptors, charge, and polar surface area. Thus, only a small number of hydrophobic and low molecular weight molecules can cross the BBB, whereas others are restricted by the barrier characteristics of the BBB, which makes it difficult to develop drugs that target the brain.

### 3. Brain and Target Cells

[0502] The central nervous system (which includes the brain and spinal cord) is composed primarily of two cell types: neurons, and glial cells. Glial cells come in several types, and perform a number of critical functions, including structural support, metabolic support, insulation, and guidance of development. Both glial cells and neurons can be a target for MEVs, as delivery of a therapeutic cargo to either type of cells is of clinical relevance. Dysfunction in glial cells associates with a variety of brain diseases such as Alzheimer's disease, Parkinson's disease, multiple sclerosis, glioblastoma, autism and psychiatric disorders. Neuronal degeneration, on the other hand, is also involved in Alzheimer's disease and Parkinson's disease, as well as ischemic stroke and a number of genetic neurodegenerative conditions, including amyotrophic lateral sclerosis and Huntington's disease. Both cell types may undergo malignant transformation, resulting in brain tumors such as astrocytoma, glioblastoma and medulloblastoma.

### 4. Differences Between Biodistribution of MEVs and Other Delivery Vehicles

[0503] MEVs are different from any other kind EV and nanoparticle. Mammalian EVs are a very heterogenous group of EVs because they arise from different cells, tissues, and organs, such as from stem cells, dendritic cells, tumor cells, and other sources. There is no single mammalian EV; each has different properties and must be separately developed. They share some common phenotypic markers, but they are structurally different, carry different payloads in vivo, and, originate from different cell types. From an industrial/pharmaceutical perspective, each kind will require a more or less adapted process and must be constituted for each kind of mammalian EV, and they are not necessarily routine or easy to produce.

[0504] MEVs, as shown herein, are uniform in composition. For exogenously-loaded MEVs, a single and common process for production and purification can result in a myriad of products using the same MEVs, which when exogenously loaded, can carry different payloads, such as small molecules, RNA products, proteins, peptides, polypeptides, and others. The MEVs are uniform in structure and contents. From a regulatory perspective, as the outside of the MEV is the same (irrespective from the payload inside) the MEVs will share the same toxicities, if any, or lack thereof. Formulations can be developed for each route of delivery independent of cargo (payload). Endogenously-loaded MEVs will be similarly uniform in structure.

[0505] It is shown and described herein, that the MEVs traverse unique pathways, depending on the route of administration. For example, as discussed elsewhere herein, MEVs provide unique routes of delivery via oral administration compared to EVs from other sources, nanoparticles, and viruses. With respect to intranasal administration, prior art has established, for example that:
[0506] 1) the IN route of administration is a suitable way to access the brain and to deliver drugs and biologicals;
[0507] 2) Extracellular vesicles from mammalian origin have been reported to deliver payloads to the brain (including proteins, siRNA, miRNA, mRNA) by IN and other routes of administration. See, e.g., ncbi.nlm.nih.gov/pmc/articles/PMC6202788/, ncbi.nlm.nih.gov/pmc/articles/PMC7409518/, ncbi.nlm.nih.gov/pmc/articles/PMC8363003/;
[0508] 3) Synthetic nanoparticles (also referred to as nanovectors) made of synthetic molecules/lipids plus lipids extracted from grapefruit exosome-like nanoparticles, have been reported to deliver siRNA to the brain by IN administration. These synthetic nanovectors are reported to reach the olfactory bulb, the hippocampus, the thalamus, the cerebellum, the cerebral cortex, and the striatum.
[0509] 4) Synthetic nanoparticles made of polycaprolactone (polycaprolactone nanoparticles (PCL NPs) and PEG-modified PCL NPs have been reported to deliver curcumin (small molecule) to the brain by IN administration. These particles are reported to enter the brain via the trigeminal nerve; they cannot get through the olfactory nerve.
[0510] 5) Infectious viruses as well as endogenous intracellular vesicles have been reported to travel within the brain via axonal transportation.
[0511] 6) The passage of viruses and intracellular vesicles over the synapses has been demonstrated.

[0512] The following Table provides a summary of prior art extracellular vesicles (EV) from other sources, including mammalian EVs, and other nanoparticles, and their pathways upon administration, to contrast with the results using MEVs as shown and described herein. It is apparent from the table that MEVs, when administered, behave differently from EVs from other sources, and differently from other vehicles, such as lipid nanoparticles. This is particularly apparent when administration is via intranasal administration (and as discussed elsewhere herein via oral administration). It is apparent from the table and description and results presented here that MEVs follow unique pathways upon administration. MEVs behave differently from EVs from other sources. Because of the pathways followed by MEVs they can provide for targeted delivery to brain as well as other organs.

| | | Route of | | | Pathways | |
|---|---|---|---|---|---|---|
| | Type of | administration | Entry site as | Travel | (brain regions | |
| # | nanoparticle | to the brain | reported | route | targeted/reached) | Reference |
| 1 | EVs from | intranasal | Primary | Extraneuronal | Rostral brain | Zhuang et |
| | cultured | | location in the | pathway | regions | al., Mol |
| | mammalian | | olfactory bulb | | | Ther. |
| | cells | | | | | 19(10): |
| | | | | | | 1769-1779 |
| | | | | | | (2011). |
| 2 | EVs from | Intravenous, | N/A | BBB crossing | Neurons, | Alvarez- |
| | GM | systemic | | | microglia, | Erviti et |
| | mammalian | | | | oligodendrocytes | al., ″ Nat. |
| | cells | | | | in the brain | Biotechnol. |
| | | | | | | 29(4): |
| | | | | | | 341-5 (2011). |
| 3 | grapefruit- | intranasal | Not specified | Not specified | “the majority of | Wang et |
| | derived | | | | the GNVs were | al., Nat. |
| | nanovectors | | | | located in the | Commun. |
| | (GNVs) | | | | lung and brain” | 4: 1867 |
| | | | | | | (2013). |
| 4 | enzyme- | intranasal | Transport | Route not | Predominantly | Haney et |
| | loaded | | along the | specified. | cerebral frontal | al., J. |
| | mammalian | | olfactory | Hypothesis: | cortex, central | Control |
| | EVs | | nerve cells is | tetraspanins | sulcus, and | Release |
| | | | indicated | and integrins | cerebellum | 207: 18-30 |
| | | | | on exosomes | | (2015). |
| | | | | are able to | | |
| | | | | attachment to | | |
| | | | | the plasma | | |
| | | | | membranes | | |
| | | | | of target cells | | |
| 5 | grapefruit- | intranasal | by olfactory | Route not | Primary | Zhuang et |
| | derived | | bulb | specified, | locations in the | al., Mol. |
| | nanovectors | | | Hypothesis: | olfactory bulb, | Ther. |
| | (GNVs) | | | extraneuronal | hippocampus, | 24(1): |
| | | | | pathway | thalamus, and | 96-105 |
| | | | | because rapid | cerebellum | (2016). |
| | | | | movement of | | |
| | | | | GNVs into | | |
| | | | | the brain | | |
| | | | | within 1.5 | | |
| | | | | hour of IN | | |
| | | | | administration | | |
| 6 | gold | intranasal, | by olfactory | Route not | Widespread | Betzer et |
| | nanoparticle- | intravenous | bulb | specified. | biodistribution | al., ACS |
| | labeled EVs | | | Hypothesis: | in normal brain; | Nano. |
| | from | | | extraneuronal | accumulation in | 11(11): |
| | mammalian | | | pathway; | ischemic-like | 10883-10893 |
| | cells | | | transcytosis | damage region | (2017). |
| | | | | across blood | | |
| | | | | brain barrier | | |
| | | | | also indicated | | |
| 7 | solid lipid | Intraperitoneal, | Not specified, | IN route: | IN: nasal | Esposito et |
| | nanoparticles | intranasal | Hypothesis: | SLN reaches | region, liver, | al., Eur J |
| | (SLN) | | olfactory bulb | CNS through | spleen and | Pharm |
| | | | for IN | 1) direct | kidneys; some | Biopharm. |
| | | | administration | olfactory | in the brain | 115: |
| | | | BBB after IP | transport, | | 285-296 |
| | | | administration | along the | | (2017). |
| | | | | olfactory and | | |
| | | | | trigeminal | | |
| | | | | nerves | | |
| | | | | pathway or 2) | | |
| | | | | systemic | | |
| | | | | circulation | | |
| | | | | pathway via | | |
| | | | | the transmucosal | | |
| | | | | absorption | | |
| | | | | IP route: | | |
| | | | | hepatic portal | | |
| | | | | system and BBB | | |
| 8 | modified | intravenous | N/A | BBB crossing | Ischemic lesion | Tian et al., |
| | EVs from | | | | region, entering | Biomaterials |
| | mammalian | | | | microglia, | 150: |
| | cells | | | | neurons and | 137-149 |
| | | | | | astrocytes | (2018). |
| 9 | grapefruit- | intranasal | by olfactory | Route not | Primary | US |
| | derived | | bulb | specified | locations in the | application |
| | nanovectors | | | Hypothesis: | olfactory bulb, | publication |
| | (GNVs) | | | extraneuronal | hippocampus, | 20180362974 |
| | | | | pathway | thalamus, and | |
| | | | | because the | cerebellum | |
| | | | | authors found | | |
| | | | | rapid movement | | |
| | | | | of GNVs into | | |
| | | | | the brain | | |
| | | | | within 1.5 | | |
| | | | | hour of IN | | |
| | | | | administration | | |
| 10 | EVs from | intranasal | Not specified | EVs are taken | Microglia at 4 | Hu et al., |
| | stimulated | | | up by | hrs: primarily in | Mol. Ther. |
| | mammalian | | | microglial | the lungs, brain, | Nucleic |
| | cells | | | cells | gut, liver, and | Acids. |
| | | | | | heart; at 24 hrs: | 13: |
| | | | | | in the brain and | 450-463 |
| | | | | | heart, but | (2018). |
| | | | | | absent in the | |
| | | | | | lungs and the | |
| | | | | | gut | |
| 11 | drug-loaded | intranasal | Olfactory | Nasal mucosa | High | Natsheh et |
| | artificial | | region | membrane | accumulation in | al., Drug |
| | phospholipid- | | | indicated | the cerebrum | Deliv. |
| | based | | | from in vitro | and also in the | Transl. |
| | vesicles | | | experiments. | olfactory bulb | Res. |
| | | | | Hypothesis: | (within 10 | 8(3): |
| | | | | systemic | minutes) | 806-819 |
| | | | | absorption | | (2018). |
| | | | | in vivo | | |
| 12 | gold | intranasal | Migration of | BBB crossing | in brain and | Guo et al., |
| | nanoparticle- | | EVs to the | | olfactory bulbs | ACS Nano. |
| | labeled EVs | | spinal cord is | | in healthy | 13(9): |
| | from human | | by chemotaxis, | | animals, spinal | 10015-10028 |
| | stem cells | | but entry of | | cord lesions in a | (2019). |
| | | | EVs not | | model of injury | |
| | | | specified | | | |
| 13 | gold | intranasal | Migration of | BBB crossing | brain and | WO2019186558A1 |
| | nanoparticle- | | EVs to the | | olfactory bulbs | |
| | labeled EVs | | spinal cord is | | in healthy | |
| | from human | | by chemotaxis, | | animals, spinal | |
| | stem cells | | but entry of | | cord lesions in a | |
| | | | EVs not | | model of injury | |
| | | | specified | | | |
| 14 | enzyme- | intrathecal, | Not specified | Not specified | hypothalamus, | Haney et |
| | loaded | intranasal, | | | thalamus, pons, | al., Cells. |
| | mammalian | intravenous, | | | spinal cord | 9(5): 1273 |
| | EVs | intraperitoneal | | | little, if any, | (2020). |
| | | | | | DiR signal | |
| | | | | | after IN | |
| | | | | | administration | |
| | | | | | (over 6-480 hrs) | |
| 15 | EVs from | Intra- | Not specified. | Extracellular | Various | Ioannides |
| | human stem | hippocampal | Depends on | space or | subregions of | et al. J. |
| | cells | transplantation, | route of | circulation | the brain at | Cancer |
| | | retro-orbital | administration: | | roughly | Metastasis |
| | | vein injection, | i.h.-Migrates | | equivalent | Treat |
| | | intranasal | through CA1 | | levels | 6(15): |
| | | | stratum | | | 10.20517/2394- |
| | | | radiatum, r.o.- | | | 4722 |
| | | | Trigeminal | | | (2020). |
| | | | nerve, i.n.- | | | |
| | | | Olfactory | | | |
| | | | bulb/trigeminal | | | |
| | | | nerve. | | | |
| 16 | EVs from | intranasal | Not specified, | Not detailed, | CA1 region of | Losurdo et |
| | stimulated | | likely | but rapid | medial | al. ″ Stem |
| | human stem | | olfactory and | detection in | hippocampus | Cells |
| | cells | | trigeminal | brain | (EVs robustly | Transl |
| | | | nerve | indicates | incorporated | Med. 9(9): |
| | | | pathways. | extraneuronal | into CA1 | 1068-1084 |
| | | | | pathway; | microglia and, | (2020). |
| | | | | transcytosis | to some extent, | |
| | | | | across blood | into neurons, | |
| | | | | brain barrier | but not in | |
| | | | | | astrocytes) | |
| 17 | EVs from | intranasal | Not specified, | Not specified, | EVs did not | Tsivion- |
| | human stem | | likely | likely BBB | accumulated in | Visbord et |
| | cells | | olfactory and | crossing | the brain over a | al. Transl. |
| | | | trigeminal | | 24 h in healthy | Psychiatry |
| | | | nerve | | mice; | 10(1): 305 |
| | | | pathways. | | accumulation in | doi: 10.1038 |
| | | | | | the prefrontal | (2020). |
| | | | | | cortex in a | |
| | | | | | model of | |
| | | | | | schizophrenia | |
| 18 | RNA-loaded | intranasal | Not specified. | Not detailed. | Microglia; at 4 | Chivero et |
| | EVs from | | olfactory and | The rapid | hrs labelled | al. Front |
| | cultured | | trigeminal | detection in | RNA cargo is | Cell Dev |
| | mammalian | | nerve | brain | detectable in | Bio. 8: 573 |
| | cells | | pathways. | indicates | the brain. | doi: 10.3389 |
| | | | | extraneuronal | | (2020). |
| | | | | pathway; | | |
| | | | | transcytosis | | |
| | | | | across blood | | |
| | | | | brain barrier | | |
| 19 | drug-loaded | intranasal | Not specified. | BBB crossing | Brain | Touitou et |
| | artificial | | Hypothesis: | | accumulation | al. Int. J. |
| | multilamellar | | nasal mucosa, | | confirmed, by | Pharm. |
| | vesicles | | likely | | functional | 580: 119243 |
| | | | olfactory and | | assays | (2020). |
| | | | trigeminal | | | |
| | | | pathways. | | | |
| 20 | enzyme- | intranasal | Transport | BBB crossing | Predominantly | US patent |
| | loaded | | along the | | cerebral frontal | application |
| | mammalian | | olfactory | | cortex, central | pub |
| | EVs | | nerve cells is | | sulcus, and | 20200297631 A1 |
| | | | indicated | | cerebellum | |
| 21 | EVs from | intranasal | Primary | Extraneuronal | Intranasal | U.S. Pat. No. |
| | cultured | | location in the | pathway | delivery | 10,799,457 |
| | mammalian | | olfactory bulb | indicated; | accumulates in | B2 |
| | cells | | | able to cross | microglia | |
| | | | | BBB | | |
| 22 | EVs from | intranasal | Not specified, | Not specified, | Cortical | U.S. Pat. No. |
| | human stem | | likely | likely BBB | damage region | 10,857,187 |
| | cells | | olfactory and | crossing | (traumatic brain | B2 |
| | | | trigeminal | | injury model). | |
| | | | nerve | | | |
| | | | pathways. | | | |
| 23 | EVs from | intranasal | Not specified, | BBB crossing | Cortical | Moss et al. |
| | human stem | | likely | | damage region | Neurochem |
| | cells | | olfactory and | | (traumatic brain | Int. 150: |
| | | | trigeminal | | injury model) | 105173 |
| | | | nerve | | | (2021). |
| | | | pathways. | | | |
| 24 | EVs from | intranasal | Olfactory and | mechanism | Rostral portion | Pusic et al. |
| | stimulated | | trigeminal | unclear. | of the brain and | PloS |
| | mammalian | | nerve | Hypothesis: | the cervical | one 16(8): |
| | cells | | pathways | nasal mucosa | spinal cord | e0255778 |
| | | | | through | | (2021). |
| | | | | paracellular | | |
| | | | | or transcellular | | |
| | | | | route; BBB | | |
| | | | | crossing | | |
| 25 | nanoparticle- | intravenous | Systemic | BBB crossing | Experimental | Niu et al. |
| | loaded | | circulatory | | brain tumor | Nano Lett. |
| | natural | | system | | uptake | 21(3): |
| | grapefruit | | | | | 1484-1492 |
| | EVs | | | | | (2021). |
| 26 | enzyme- | intranasal | olfactory and | BBB crossing | extensive signal | Hayes et al. |
| | loaded | | trigeminal | | in the prefrontal | Neurotox. |
| | mammalian | | tracts; blood | | cortex, corpus | Res. 39(5): |
| | EVs | | via the nasal | | callosum, and | 1418-1429 |
| | | | epithelium | | hippocampus | (2021). |
| 27 | EVs from | intranasal | Transport | BBB crossing | Inflamed brain | Zhao et al. |
| | GM | | along the | | tissues via | Cells 11(12): |
| | mammalian | | olfactory | | LFA1/ICAM1 | 1933 |
| | cells | | nerve cells is | | interactions | (2022). |
| | | | indicated | | | |
| 28 | magnetic | intranasal | Intranasal | BBB crossing | In the brain 1 | Kutchy et |
| | nanoparticle- | (multiple | perfusion | | day post- | al. Front. |
| | loaded EVs | adminis- | along | | administration | Pharmacol. |
| | from | trations) | olfactory and | | | 13, |
| | mammalian | | trigeminal | | | 819516: |
| | cells | | neural | | | 1-9 |
| | | | pathways | | | (2022). |
| 29 | drug-loaded | intranasal | Not specified | BBB crossing | Only functional | Elsheikh et |
| | artificial | (daily | | | assays showing | al. |
| | bilosomes | administrations | | | improvement in | Pharmaceutics |
| | (bile-salt- | over 21 days | | | a mouse model | vol. |
| | based nano- | | | | of Alzheimer's | 14(3): 576 |
| | vesicles) | | | | Disease | (2022). |

[0513] It is shown and described herein that MEVs have properties, including biodistribution, that are distinct from other EVs. The pathways by which the MEVs enter the brain and their ultimate destination differ from those observed for other delivery vehicles. IN administration allows the penetration of MEVs into the brain. As discussed and demonstrated herein, the primary route of penetration of the brain and biodistribution upon IN administration of MEVs is via the olfactory nerve (ON), the mitral/tufted neurons, and the lateral olfactory tract (LOT) in contrast to biodistribution of prior art EVs and nanoparticles via the trigeminal nerve. The MEVs are internalized by the olfactory sensory neurons (OSNs) and travel intracellularly from the olfactory epithelium to the olfactory bulb, through the cribriform plate in the skull. This is in contrast to routes of other delivery vehicles and prior art that indicate or from which it can be inferred that prior art vehicles traffic from the olfactory epithelium to the brain by paracellular transport or transcellular transport. As shown and described herein, intranasally administered MEVs travel from one brain region to another via axonal transport, and more specifically, along the axons of the mitral/tufted neurons throughput the LOT circuit. As shown and described herein, MEVs pass through the synaptic space, in at least at three stages: (1) synapses between the olfactory sensory neurons (OSNs) and mitral/tufted neurons inside the glomeruli in the olfactory bulb; (2) synapses between mitral/tufted axons and neurons resident in brain regions primary colonized by the lateral olfactory tract (LOT), which includes the anterior olfactory nucleus, the tenia tecta, the piriform cortex, the amygdala, the entorhinal cortex; and (3) synapses between the axons afferent from those primary regions of the olfactory tract and the neurons in other brain regions, such as the cortex, the hippocampus, and the hypothalamus connected to the olfactory tract.

[0514] As shown in the examples, the brain regions in which the MEVs are found after IN administration perfectly match: (1) the regions that are directly colonized by the mitral and tufted neurons in the LOT (the anterior olfactory nucleus, the tenia tecta, the piriform cortex, the amygdala, the entorhinal cortex); and (2) the regions in the brain that are secondarily connected with the primary target regions, such as the cortex, the hippocampus, the hypothalamus. It is these loci in the brain that can be targeted with therapeutic and diagnostic agents selected for treatment and/or detection of diseases, disorders, and conditions of the brain and the CNS, or diseases, disorders, and conditions that involve the brain and/or CNS.

### 5. Intranasal Administration

[0515] With increasing knowledge of the pathways and functions inside the brain, and as the need for new therapeutics increases, there is a demand for new and more potent CNS drugs. One area is neurodegenerative disorders, where, not only is the pathogenesis not understood, but also drug molecules are not able to reach the target tissue in the brain at an appropriate concentration level. IN administration can provide a way for delivery of therapeutically effective drug concentrations in the brain parenchyma. The absorption of the drugs from the nasal cavity and how they are transported via extracellular (intercellular) or intracellular (transcellular) pathways is under study. Intracellular transport involves a first step of endocytosis into the olfactory sensory neurons. After the neuronal uptake, the molecules move away along the axons to the synapse where they are exocytosed (FIG. 13) and transported further into the brain throughout various synapses.

[0516] However, there are limitations for IN delivery of naked drugs (unprotected, non-encapsulated, not loaded inside a nanoparticle, a vesicle or other delivery vehicle). IN delivery of naked drugs is limited to potent drugs delivered in small volumes (25-200 μL in humans), with active mucociliary clearance, short retention time, enzymatic degradation by nasal cytochrome P450/peptidases/proteases (pseudo first pass effect), low permeability for hydrophilic drugs, the need for absorption enhancers, low nasal epithelial pH, inter individual variability, low CNS delivery for proteins, and nasal secretion.

[0517] A few products have been approved for IN administration; a few more are in development; all of them are small molecules. Approved products are IMITREX® (GlaxoSmithKline) approved in 1997; MIGRANAL® (Bausch Health Companies) approved in 1997; ZOMIG® (Amneal Pharmaceuticals) approved in 2003, ONZETRA® X (Currax Pharmaceuticals) approved in 2016; and TOSYMRA® (Upsher-Smith Laboratories) approved in 2019. Although these products are administered by the IN route, they enter the blood through the highly vascularized respiratory epithelium (not the olfactory epithelium) and once in the blood they still need to go through the blood-brain barrier. The challenge of being able to bypass the blood-brain barrier by entering the olfactory epithelium has so far not been achieved, and the full potential of IN delivery is yet to be captured.

[0518] The olfactory route, trigeminal route, and vomeronasal route can provide direct access to certain regions of the brain, that will otherwise not be reachable. There is still need for optimization of this route(s) as well as full understanding of dosing and safety following nasal drug administration. IN delivery of therapeutic agents is a future perspective to treat neurological diseases.

[0519] Administration through the IN route has been recognized as a route for the administration of medicines to the brain, but it is not well-developed nor has it been effectively exploited. Most naked drugs are unstable in the nasal epithelium, and/or unable to cross the barriers from the olfactory epithelium to the olfactory bulb, and/or unable to efficiently move inside the neurons following the axonal networks to reach intimate and specific regions of the brain. Such endeavor has only been used for small chemical molecules; most (if not all) biological molecules (such as DNA, RNA (mRNA, siRNA), complex proteins (antibodies) cannot be administered via an IN route. Hence there is a need to develop vehicles to effectively exploit this route of delivery. As demonstrated herein, MEVs provide such a vehicle.

[0520] The olfactory region of the nose is the only part in the whole body where the CNS is in contact with the peripheral environment due to the presence of olfactory receptors neuronally linked to the olfactory bulb. Olfactory and trigeminal nerve pathways allow active agents to be absorbed in the olfactory region and transferred directly into the brain bypassing the BBB.

[0521] The nasal cavity is divided into the respiratory area (closer to the nostrils) and the olfactory area (situated high up in the cavity) (Sahin-Yilmaz et al. (2011) Proc. American Thoracic Society 8:31-39). The nasal epithelium is well vascularized (Sahin-Yilmaz (2011) Proc. American Thoracic Society 8:31-39), and, within the olfactory area, olfactory neurons are exposed providing the transport of naked drug compounds directly into the brain via the olfactory neurons. Absorption of naked molecules takes place at the olfactory and respiratory epithelia (Lochhead et al. (2012) Advanced Drug Delivery Reviews 64:614-628). The routes of transportation of naked molecules from the nasal olfactory area to the olfactory bulb are transcellular through either the sustentacular cells or the exposed olfactory sensory neurons. The route of transfer of such compounds from the nasal respiratory epithelium to the brain is via the trigeminal nerves (Ying (December 2007 online) Future Neurol.3 no. 1, doi.org/10.2217/14796708.3.1.1; Lochhead et al. (2012) Advanced Drug Delivery Reviews 64:614-628). Transport to other brain areas after entry to the brain (e.g., to the mid brain from the olfactory bulb or to the brain stem from the trigeminal nerve) is thought to be mainly by either extracellular convective bulk flow (Lochhead et al. (2012) Advanced Drug Delivery Reviews 64:614-628) or via perivascular routes (Lochhead et al. (2015) J. Cerebral Blood Flow Metab. 35:371-381, doi.org/10.1038/jcbfm.2014.215).

[0522] In general, direct nose-to-brain delivery obtained demonstrated for rats or mice will overestimate direct nose-to-brain transport in humans if differences in the relative surface area are not adequately accounted for. In contrast, the nasal respiratory epithelium line approximately 50% of the nasal cavity in rats and 80-90% in humans. Therefore, it is possible that access to the brain through trigeminal pathway in primates is underestimated from experiments performed in rodents.

### 6. MEVs and Delivery to the Brain Following Intranasal Administration

[0523] As discussed above and herein, the fate of MEVs upon administration via various routes, including intranasal administration, was not known, nor could it have been predicted from the prior art describing trafficking and biodistribution of administration, including IN administration of other delivery vehicles, such as nanoparticles and EVs from other sources. As discussed in more detail in the following section, it is shown and described herein that MEVs, as exemplified by IN administration of Chlorella MEVs, are delivered to the brain following IN administration. As discussed above, and shown in the Examples, MEVs are internalized by the dendrites of the olfactory sensory neurons (OSN) and subsequently are intracellularly passaged from the olfactory epithelium to the olfactory bulb, through the cribriform plate in the skull. As shown herein, the delivery to the brain of MEVs upon IN administration occurs via the olfactory nerve (ON), the mitral/tufted neurons, and/or the lateral olfactory tract (LOT) in the biodistribution and penetration of the brain by MEV. Known EVs are reported to use the trigeminal nerve route and they do not enter the olfactory nerve, and some of the prior art, noted in the table above, that describe nanovectors do not mention the olfactory nerve, the mitral/tufted or the LOT. As noted, there is no suggestion in the prior art of the involvement of axonal transport in the movement of any delivery vehicle from one region to another region, inside the brain. Moreover, in the prior art it is systematically suggested that the entry of the particles to the brain and their movement inside the brain is paracellular or extracellular. Thus, those particles would be either reaching the interstitial liquid between brain cells, or the surrounding capillaries in which case they still need to cross the BBB. As shown herein, regions traversed by the MEVs match the regions that are directly colonized by the mitral and tufted neurons (i.e., the olfactory network), and also those regions in the brain cortex that are secondarily connected with the primary target regions.

### 7. Trafficking and Biodistribution of MEVs Following Intranasal (IN) Administration

[0524] Trafficking and biodistribution studies on the fate of MEVs following IN administration were performed and the distribution pathways and patterns were mapped. In the exemplified studies, MEVs were stained with DiR (DiIC18 (7); 1,1′-dioctadecyl-3,3,3′,3′-tetramethylindotricarbocyanine iodide), which is a lipophilic, near-infrared fluorescent cyanine dye. The dye is suitable for labeling lipid membranes detected with near-infrared in vivo imaging. The two long 18-carbon chains insert into the membrane, resulting in specific and stable vesicle staining with no or minimal dye transfer between vesicles. The studies were conducted in recognized rodent models.

[0525] The size of neural cells in mouse brain varies, but the typical nucleus diameter is approx. 5-8 microns. The size of MEVs is about 50-200 nm, with median diameter of 125 nm or 0.125 micron, as measured by Nanoparticle Tracker Analysis (NTA). Images from the positive control slides (FIG. 14) confirm the presence and detectability of the Dir-labelled MEV and demonstrate the size-homogeneity of the MEV material.

[0526] It is shown herein that from 1 h to 8 h after IN administration to mice, MEVs can be observed in the following regions of the brain: (1) the olfactory bulb, (2) cortical regions (primary somatosensory, primary visual, primary motor, piriform, agranular insular, frontal, retrosplenial granular, temporal association, auditory, entorhinal), (3) the amygdaloid nuclei (basomedial and basolateral amygdaloid nuclei, amygdalo-hippocampal area, amygdala-piriform transition area), (4) the arcuate hypothalamic nucleus, and (5) the mammillary nucleus. Upon 16 h after IN administration, MEVs can be seen in the thalamus, the cortex, and in different levels of the hippocampus (fimbria and dentate gyrus). The olfactory bulb still contains fluorescent MEVs by 16 h after administration, suggesting that MEVs may continue coming into the olfactory bulb/brain from the nasal cavity over a significant period of time.

[0527] Thus, after intra-nasal (IN) administration in an in vivo model, MEVs are found in regions of the brain corresponding to projections of the olfactory bulb (OB) throughout the olfactory network as well as in other regions connected to the olfactory network. Such regions include the piriform cortex (which plays an important role in focal epileptogenesis, forms the major part of the primary olfactory cortex and has extensive connections with other parts of the olfactory network), as well as other cortical regions, such as the temporal association cortex (responsible for identification and integration of complex stimuli), the ectorhinal cortex (under control of OB during working memory performance), and the auditory cortex where auditory and olfactory codes are subjected to cross-modal modulation.

[0528] The highest density of vesicles was found in (1) the arcuate nucleus of the hypothalamus which has a central role in homeostasis, (2) the amygdala at the center of behaviors related to panic, anxiety, stress, addiction, and (3) the mammillary bodies which are very important in episodic memory processing within the Papez circuit. In accord with the trafficking data, following IN administration, MEVs are transported following the olfactory circuitry up to various brain regions that are connected to brain nuclei strongly involved in behavior, memory, emotions, and perception of the environment. Consequently, MEVs can be used for delivering directly to the brain cargos that are therapeutic tools for a large diversity of brain and CNS diseases, disorders, and conditions, including, for example, those related to related to epilepsy, food intake, appetite, sexual behavior, stress (PTSD), anxiety, depression, addiction, memory, and others. They also can be used for carrying and delivering detectable cargos for diagnostics and/or theranostics.

[0529] The data show that the IN administration of the MEVs leads to a progressive biodistribution of the vesicles in different but specific brain areas. This biodistribution is time-dependent and observed from the rostral to the caudal regions of the brain. One hour after MEV administration, MEVs are only detected in the olfactory nerve layer but not in other more caudal regions. At 2 hours post administration, MEVs reach cortical regions such as the primary motor cortex, the piriform cortex, the frontal cortex, the agranular insular cortex, the primary somatosensory cortex, the auditory cortex, the retrosplenial granular cortex and the temporal association cortex. MEVs also were found in the basolateral amygdaloid nucleus, and the arcuate hypothalamic nucleus. No fluorescence was observed in other regions at the same bregma; bregma is a unit that measures the distance between a location in the brain and the point of junction between the coronal and the sagittal sutures of the skull.

[0530] The insula, one of the regions of the brain that is reached rapidly by the MEVs upon IN administration, is a core region that is affected by or involved in many psychiatric and neurological disorders. Many of the anatomical and functional features of the insula are shared across rodents and men, so that rodent models are useful to demonstrate effects and uses for humans. The insula is a hub linking large-scale brain systems. The insular cortex is a true anatomical integration hub with heavy connectivity to an extensive network of cortical and subcortical brain regions serving sensory, emotional, motivational, and cognitive functions (see FIG. 15). The insula receives heavy sensory inputs from all modalities. Direct thalamic and horizontal cortical afferents carry information to the insula from outside the body (auditory, somatosensory, olfactory, gustatory, and visual information) and from inside the body (interoceptive information). Several of these inputs project to topographically organized insular sensory regions, giving rise to the ‘visceral insular cortex’, the ‘gustatory cortex’ (the primary taste cortex), and the insular auditory and somatosensory fields. None of these sensory regions processes only its major sensory input; all regions of the insula receive heavy cross-modal afferents and can be considered to be multimodal integration sites. In addition to its sensory afferents, the insula makes reciprocal connections with the limbic system. For instance, the lateral and basolateral amygdala heavily project to the granular and dysgranular regions of the insula, which in turn send dense efferent signals to the basolateral, lateral and central amygdala nuclei. The insula also connects to the lateral part of the bed nucleus of the stria terminalis, the mediodorsal nucleus of the thalamus, the lateral hypothalamus, and parahippocampal regions, including the perirhinal and the lateral entorhinal cortices. The insula reciprocally connects with frontal brain regions such as the anterior cingulate, the orbitofrontal, and the medial prefrontal cortices, which are implicated in cognitive, emotional and executive functions, and projects to parts of the brain implicated in motivation and reward, such as the nucleus accumbens and the caudate putamen. The insular cortex receives strong neuromodulatory input from cholinergic, dopaminergic, serotonergic, and noradrenergic afferents.

[0531] At 4 hours post administration, MEVs migrate up to more caudal brain regions reaching the main body of the amygdala, the left and right auditory cortex, the temporal association cortex and the ectorhinal cortex.

[0532] Within 8 h after administration, MEVs are not observed in the caudate putamen, the thalamus, the hippocampus, or the substantia nigra, nor in the most caudal sections examined corresponding to structures like the trigeminal nucleus, the inferior colliculus, the tegmental nucleus and the parabrachial nucleus, indicating that the MEVs do not reach the most caudal part of the brain within the 8 h time window.

[0533] It is known that direct nose-to-brain transport of molecules or other structures may occur either via the olfactory nerve or via the trigeminal nerve. Projections of the olfactory nerve originating in the olfactory bulb (OB) penetrate the cribriform plate and terminate at the apical surface of the olfactory neuroepithelium; located at the roof of the nasal cavity. Filaments of the olfactory nerves are present both in the anterior and posterior parts at the middle turbinate. On the other side, the respiratory mucosa (located on the walls of the nasal cavity) is densely innervated by sensory and parasympathetic trigeminal nerves and is even more extensive than the olfactory nerve. Sensory maxillary branches innervate the deepest nasal segments, including the olfactory cleft. Unlike olfactory sensory neurons, the trigeminal nerve endings do not penetrate the mucosal surface. Access of molecules to the dense network of trigeminal nerve endings is thus limited by their ability to cross the mucosal layer.

[0534] The mechanisms involved in the transport of naked molecules from the nasal cavity to the brain are well known; they have been investigated by using [¹²⁵I]-proteins. Transport across the ‘barriers’ presented by the olfactory and/or respiratory epithelia can occur either by intracellular or extracellular pathways. Intracellular pathways across the olfactory epithelium include (i) endocytosis into olfactory sensory neurons (OSN) and subsequent intraneuronal transport, including intraneuronal axonal transport and also transport between neurons across synapses, to the olfactory bulb and (ii) transcytosis (i.e., transcellular transport) across sustentacular cells to the lamina propria as shown in FIGS. 13 and 16.

[0535] FIG. 13 depicts routes of passage through the olfactory epithelium. Four different routes have been described for nose-to-brain drug delivery: (1) OSN extracellular transport: the compound enters directly to the CNS along the OSN (or trigeminal nerve which is not shown in the figure) via bulk flow processes through the tissular liquid surrounding the cells, (2) OSN intracellular transport: the compound is endocytosed and then shuttled to the CNS by a well-organized pathway of intracellular structures inside the OSN), (3) Epithelial or supporting cells intracellular transport: the compound is endocytosed by the supporting epithelial cells and then travel through the intracellular space, (4) Epithelial or supporting cells extracellular pathway: the compound has to pass through the tight junctions like zonula occludens (ZO), claudin (CL), and occludin (OC). Abbreviations: supporting cells (SUS); olfactory sensory neurons (OSN); olfactory ensheathing cells (OEC); globose basal cells (GOB); horizontal basal cells (HBC); Bowman's gland (BG); cribriform plate (CP); olfactory bulb (OB).

[0536] FIG. 17 is a schematic showing the pathways and approximate average distances from the olfactory and respiratory epithelium to CNS targets. Figure reference: Perivascular and Perineural Pathways Involved in Brain Delivery and Distribution of Drugs after Intranasal Administration, Jeffrey J. Lochhead and Thomas P. Davis, Department of Pharmacology, University of Arizona. Pharmaceutics 2019, 11 (11): 598; doi.org/10.3390/pharmaceutics11110598

[0537] OSN have the ability to endocytose certain viruses, such as herpes, poliomyelitis, rhabdoviruses, coronaviruses, and also large molecules, such as horseradish peroxidase (HRP), wheat germ agglutinin-horseradish peroxidase (WGA-HRP), and albumin, from the nasal passages and then transport them intracellularly along the axon in the anterograde direction towards the olfactory bulb. HRP is taken up by OSN to a limited extent via fluid-phase endocytosis whereas WGA-HRP is internalized by OSN more avidly via adsorptive endocytosis. (Gänger et al. (2018) Pharmaceutics 10:116, doi: 103390/10030116).

[0538] Olfactory sensory neurons (OSN) have several unique attributes: they are the only first order neurons possessing cell bodies located in a distal epithelium and the tips of their dendritic processes, which end as enlarged knobs with several non-motile cilia, extend far into the overlying mucus layer that is directly exposed to the external environment. (FIG. 16; Son et al. (2021) BMB Reports 54 (6): 295-304).

[0539] Alternatively, intracellular pathways across the respiratory epithelium can include endocytosis into peripheral trigeminal nerve neurons located near the epithelial surface and subsequent intracellular transport to the brainstem or transcytosis across other cells of the respiratory epithelium to the lamina propria (see FIG. 17). As observed in the OSN, intranasal WGA-HRP is internalized and transported intra-neuronally within the trigeminal nerve to the brainstem. Viruses and bacteria also can be transmitted to the CNS along trigeminal nerve components within the nasal passages (Lochhead et al. (2012) Advanced Drug Delivery Reviews 64:614-628).

[0540] Based on data shown and described herein, MEVs are transported through the olfactory nerve and the olfactory tract into the olfactory networks in the brain. While not observed because of the duration of the studies, the data do not exclude transportation of the MEVs through the trigeminal nerve and trigeminal network, as the transport through the trigeminal nerves would take substantially longer before the entry point in the posterior part of the brain (the pons) is reached. The observed pathways, however, are unique to MEVs.

[0541] The respective distances from olfactory or respiratory epithelium to CNS have allowed the calculation of transportation time for proteins. Using published data (Buchner et al. (1987) Neuroscience 22:697-707) for fast (130 mm/day) and slow (36 mm/day) axonal transport of exogenous proteins in pike olfactory nerves (corrected to 37° C.), indicate that intracellular transport (via axonal transport) within olfactory neurons to the olfactory bulb for MEVs should take 0.74 h-2.7 h, and 3.7 h-13 h for intracellular transport (via axonal transport) within trigeminal ganglion cells to the brainstem, assuming similar transport rates in OSN and trigeminal cells. As discussed below, based on data herein, there is no evidence indicating involvement of the trigeminal nerve in the brain penetration of MEVs at least through the duration of study post-administration.

[0542] The data indicate that MEVs are transported through the axons projecting from mitral/tufted cells in the olfactory bulb. Axons of mitral/tufted cells are fasciculated and form the two lateral olfactory tracts (LOT), one on each side of the brain. They extend multiple collaterals that project to various areas of the olfactory cortex, including the anterior olfactory nucleus, the olfactory tubercle, the piriform cortex, the lateral entorhinal cortex, the cortical amygdala, among other (see, FIGS. 13, 16, and 18-20).

[0543] FIG. 16 presents a schematic diagram of the brain neuronal pathway from the olfactory sensory neurons (OSN) through the olfactory bulb (OB) to the mitral and tufted neurons, to the olfactory tract (OT).

[0544] FIG. 18 presents a cortical projection of mitral and tufted cells. Ventrolateral view of the brain is schematically shown (reproduced from Construction of functional neuronal circuitry in the olfactory bulb, November 2014, Seminars in Cell and Developmental Biology 35, DOI: 10.1016/j.semcdb.2014.07.012, Takeshi Imai, Kyushu University).

[0545] FIG. 19 shows alternative possible pathways following IN administration. Based on data herein, for the MEVs, after IN administration, the pathway is from the nose to the olfactory epithelium and then to the olfactory neurons, then the MEVs are transported by axonal transport to the olfactory bulb, then by mitral and tufted neurons to the primary olfactory regions that process the olfactory signal (Figure reproduced from Selvaraj et al. (2018) Artificial Cells, Nanomedicine, and Biotechnology An International Journal 46:2088-2095, doi.org/10.1080/21691401.2017.1420073).

[0546] FIG. 20 (reproduced from “What-when-how in Depth tutorials and information, Olfaction and Taste, Sensory system, part 1” (what-when-how.com)) shows schematics of the pathways following IN administration after reaching the OB as described for the Figure. The olfactive pathway used by MEVs after IN administration is as follows. The olfactory bulb (OB) is the first region of the CNS where sensory signals from olfactory sensory neurons (OSNs) are processed. Axons of the OSN travel in olfactory nerves and spread over the surface OB, forming an olfactory nerve layer. Located near the surface of the OB is the glomerular layer. Each glomerulus contains clusters of nerve terminals from OSN, dendrites of the tufted cells, mitral cells, and y-aminobutyric acid (GABA)-ergic interneurons, called the periglomerular cells. The terminals of first order OSN form synapses with the dendrites of the tufted, mitral, and peri-glomerular neurons. The projections of the axons of the mitral and tufted cells are shown schematically in the Figure. Olfactory tracts (LOT), located on the ventral (inferior) surface of the frontal lobe, arise from the OB. The largest bundle of axons from the mitral and tufted cells exits from the OB in the LOT, and they project to the primary olfactory cortex, piriform cortex, amygdala, and entorhinal cortex. The entorhinal and piriform cortices, hippocampus, and amygdala are in the temporal lobe; the hippocampus lies in the medial temporal lobe. The neurons in the piriform cortex, amygdala, and entorhinal cortex project to the prefrontal cortex. Note that the olfactory projection system differs from other sensory systems in that the projection pathway can reach the prefrontal cortex without having to make a synapse in the thalamus first, which is typical of other sensory systems. Neurons in the entorhinal cortex project to the hippocampus (a major limbic structure) via a fiber bundle called the perforant fiber pathway. Therefore, olfactory inputs play an important role in modulating hippocampal functions in a manner like that for the amygdala. Although olfactory projections can reach the prefrontal cortex without making a synapse in the thalamus, there are direct tertiary inputs from the piriform cortex to the mediodorsal thalamic nucleus, which projects to wide areas of the frontal lobe, including the prefrontal cortex. Some fibers from the mitral and tufted cells exit the LOT via the medial olfactory tract. These axons project ipsilaterally to basal limbic forebrain structures, such as the substantia innominata, medial septal nucleus, and bed nucleus of the stria terminalis. Other fibers in the medial olfactory stria arise from the contralateral anterior olfactory nucleus. This nucleus, located in the posterior part of each OB, receives sensory signals from mitral and tufted cells and relays them to the contralateral OB via the anterior commissure.

[0547] MEVs trafficking and regions of the brain that can be targeted or affected by delivery of MEV cargo.

[0548] The amygdala has been implicated in aspects of emotional processing. The direct connection of the olfactory bulb with some subregions of the amygdala indicates a particular role in olfactory processing; the amygdala is involved in the generation of rapid responses to olfactory stimuli (including fight/flight) particularly in approach/avoid contexts, in olfactory-related reward processing, including learning and memory of approach/avoid responses (Noto et al. (2021) Front Syst Neurosci 15:752320, doi: 10.3389/fnsys.2021.752320). The amygdala is one of the regions targeted by psychedelics, including psilocin, to elicit the biological response. The amygdala also plays a role in posttraumatic stress disorder (PTSD) (Badura-Brack et al. (2018) Psychiatry Research: Neuroimaging 271:135-141; Badura-Brack et al. (2018) Biological Psychology 132:228-232). These findings indicate that MEVs can be used to transport drugs and other agents for treatment of diseases, disorders, and conditions involving such responses.

[0549] Mammillary bodies have unique connectivity to the anterior olfactory nucleus (Zhou et al. (2019) eLife 8: e47177, doi.org/10.7554/eLife.47177). Mammillary bodies have a central role in the Papez circuit involving amygdala and thalamus and play an active role in how recognitional memory is processed.

[0550] The presence of the MEVs in the arcuate hypothalamic nuclei is consistent with the fact that ghrelin containing neurons in the olfactory bulb send collateralized projections to this brain area (Russo et al. (2018) Algorithms 11:134, doi.org/10.3390/a11090134). Ghrelin is involved in eating behaviors and the arcuate nucleus is a major integration center for peripheral satiety signals and feeding behavior.

[0551] The data show that by 16 h after IN administration of the MEVs, they are in the corpus callosum, the dorsal fornix, the dorsal hippocampal commissure and the fimbria of the hippocampus which is connected to the fornix. All these regions correspond to bundle of nerves forming white matter.

[0552] The olfactory bulb projects directly to a number of primary cortical brain structures, projections from each of these structures to the rest of the brain constitute a widespread olfactory network. Each of such primary brain structures of the olfactory network, which includes the anterior olfactory nucleus, the olfactory tubercle, and the frontal and temporal piriform cortices, subsequently form and connect to dissociable whole-brain networks. Such networks are characterized by unique functional connectivity profiles for each subregion, leading to higher profile, large-scale processing pathways of the olfactory system (Zhou et al. (2019) Nucleic Acids Research 47 (Issue W1): W234-W241, doi.org/10.1093/nar/gkz240).

[0553] The data herein show effective IN delivery of MEVs, via the olfactory nerve and throughout the lateral olfactory tracts (LOT), to a number of brain regions. Upon IN administration, MEVs enter the brain via the olfactory nerve. MEVs are internalized by the dendrites of the olfactory sensory neurons (OSN) in the olfactory epithelium (at the roof of the nasal cavity) and then be transported to the olfactory bulb (OB), intracellularly, through the body of the OSN. The olfactory nerve starts at the nasal olfactory epithelium and ends at the olfactory bulb (OB). As noted, based on the data herein, there is no evidence indicating involvement of the trigeminal nerve in the brain penetration of MEVs, in the times post-administration that have been evaluated.

[0554] Inside the olfactory bulb (OB) are the glomeruli where the incoming axons from the OSN synapse with dendrites of mitral neurons and of tufted neurons. The mitral/tufted neurons are the principal neurons in the OB. LOTs are composed of the long axons of mitral and tufted neurons that travel from the OB to the various anterior-posterior brain regions directly involved in the olfactory system, which is composed of the: anterior olfactory nucleus, olfactory tubercle, tenia tecta, piriform cortex, amygdala, and entorhinal cortex. Lateral ramifications of the main long axons of the mitral/tufted neurons enter and colonize each of the brain regions (anterior olfactory nucleus, olfactory tubercle, tenia tecta, piriform cortex, amygdala, and entorhinal cortex). Inside those regions, the mitral/tufted axons are connected (via synapses) with neurons from other regions (having a more secondary olfactory role), including the frontal cortex, the hypothalamus, and the hippocampus.

[0555] Data show that MEVs administered by IN reach all and each of the brain regions reached by the olfactory nerve and the lateral olfactory tracts (LOT) throughout the brain. MEVs arriving to the glomeruli from the OSN axons enter the mitral neurons and tufted neurons and travel following a clear pathway with a clear kinetics throughout the lateral olfactory tract (LOT) in both hemispheres: ventral, lateral and dorsal regions; external and internal regions; along the antero-posterior axis. The brain regions reached by the MEVs within 1 and 16 hours after IN administration are the anterior olfactory nucleus, the olfactory tubercle, the tenia tecta, the piriform cortex, the amygdala, the entorhinal cortex, the primary motor cortex, the frontal cortex, the agranular insular cortex, the primary somatosensory cortex, the auditory cortex, the retrosplenial granular cortex, the temporal association cortex, the basolateral amygdaloid nucleus, the arcuated hypothalamic, the corpus callosum, the internal capsule, the thalamus, the hippocampus (fimbria, dentata gyrus). The biodistribution pattern of the MEVs, thus, perfectly matches the pathways and connections of the olfactory nerve, the mitral/tufted axons, and the LOT (lateral olfactory tract) throughout the entire brain.

[0556] The images in the figures (see, e.g., FIGS. 22A-D, 24A-D, 26A-D, 28A-D) show that, in the different regions they reach, MEVs are disposed in clusters rather than as individual spots, indicating that they are released in the extracellular space surrounding the axon terminals that transported them to those regions. Most of the brain areas where MEVs have been localized correspond to the olfactory bulb circuitry (see, e.g., Imai (2014) Seminars in Cell & Developmental Biology 35:180-188; Igarashi et al. (2012) Journal of Neuroscience 32:7970-7985; doi.org/10.1523/JNEUROSCI.0154-12.2012; and Nagayama et al. (23 Sep. 2010) Front. Neural Circuits, 23; doi.org/10.3389/fncir.2010.00120).

[0557] Most brain regions reached by the MEVs are consistent with the conclusion of direct axonal connections from the olfactory bulb, such as (1) projections of ghrelin neurons from mitral cells into the arcuate hypothalamic nucleus (Russo et al. (2018) Experimental Brain Research 236:2223-2229); (2) the direct modulation of entorhinal cortex activity by the olfactory bulb (Salimi et al. (2021) The Journal of Physiological Sciences 71: Article number 21); and (3) the reciprocal connections of the agranular insular cortex with the olfactory bulb (Gehrlach et al. (2020) eLife 9: e55585). The presence of the MEVs in other cortical regions is not due to direct axonal projections from the olfactory bulb but rather indirect projections from areas like the amygdala or the mammillary bodies (direct connections between amygdala and motor cortex (Grezes et al., 2014), connections between the retrosplenial granular cortex and the RGC (Buckwalter et al. (2008) Experimental Brain Research 186:47-57), connections to the somatosensory cortex (Macdonald et al. (1998) J. Neurophysiol. 79:474-477), direct connections between mammillary bodies and RGC (Groen et al. (2003) J. Comparative Neurology 463:249-263, doi.org/10.1002/cne.10757). On the other side, the presence of MEV in the auditory cortex and in the primary visual cortex appears to be due to diffusion from proximal entorhinal cortex or RGC, respectively, as no direct neuronal connections have been reported from any of the areas of distribution.

### 8. Primary and Secondary Circuitry of the Olfactory System and Regions Reached by the MEVs Upon IN Administration

[0558] In this section, brain regions reached by the MEVs upon IN administration are indicated in bold and with an asterisk*. The olfactory sensory neurons*(OSN) are primary sensory neurons located within the olfactory epithelium in the upper nasal cavity. Axons of the OSN leave the olfactory epithelium and synapse in the olfactory bulb*(OB). These axons enter the anterior cranial fossa through the cribriform plate of the ethmoid bone. Neurons in the OB called mitral cells are secondary sensory neurons of the olfactory system. Their axons leave the OB and enter the olfactory tract*(two lateral olfactory tracts, or LOTs), which is not a peripheral nerve but part of the central nervous system.

[0559] MEVs reach cortical regions such as the primary motor cortex*, the piriform cortex*, the frontal cortex*, the agranular insular cortex*, the primary somatosensory cortex*, the auditory cortex*, the retrosplenial granular cortex*, the temporal association cortex*, the basolateral amygdaloid nucleus*, and the arcuate hypothalamic nucleus*.

[0560] Some fibers of the LOT turn laterally and project themselves to the olfactory cortex*(all gray matter areas that receive output from the OB). The main areas of the olfactory cortex are the piriform cortex*(the most posterior part of the orbitofrontal cortex), the cortical amygdala*(this is the superficial part of the amygdala). The olfactory cortex projects to the hypothalamus*. The hypothalamus is described as using olfactory information to affect feeding, reproductive activity, and autonomic reflexes triggered by olfactory signals.

[0561] The olfactory cortex (and the gustatory cortex) project to the orbital prefrontal cortex*(the inferior surface of the frontal lobe), where information from both sensory modalities can be combined for the sensation of flavor. The limbic system contains the limbic lobe and other cortical regions that have connections with the limbic lobe. This group of structures is associated with learning, memory, emotion, and motivation. The limbic lobe is composed by the cingulate gyrus, the parahippocampal gyrus, and the hippocampus.

[0562] The cingulate gyrus*is the cortex adjacent to the corpus callosum*. The anterior half of the parahippocampal gyrus is called entorhinal cortex*, which is one of the four components of the hippocampus. The entorhinal cortex is part of both the parahippocampal gyrus and the hippocampus*.

[0563] There are four components of the hippocampus: the entorhinal cortex and the three components of the rolled-in part of the hippocampus—the dentate gyrus, the Ammon's horn, and the subiculum. The entorhinal axons synapse on the granule cells in the dentate gyrus, the granule cell axons synapse on the pyramidal cells of Ammon's horn, which synapse on the pyramidal cells of the subiculum. The hippocampus is necessary for storing recent memories of facts and events. It receives processed information from all sensory cortices which projects to the inferior temporal cortex, which in turn sends axons to the entorhinal cortex. Through these connections, the hippocampus is informed about sensory processing in all cortical areas.

[0564] A circle of connections from the hippocampus to the mammillary body*, to anterior thalamus*, to cingulate cortex, and back to the hippocampus through the cingulum and parahippocampal gyrus is known as the Papez circuit. Axons of cells in the hippocampus form a layer of white matter known as the fimbria*. The fornix is the major projection from the hippocampus*, it dives into the hypothalamus*and terminates in the mammillary body*. The mammillary body*projects to the anterior nucleus of the thalamus*, which at its turn sends axons to the cingulate gyrus. Axons from the cingulate gyrus go to the parahippocampal gyrus and the entorhinal cortex*, completing the circuit back to hippocampus*.

[0565] The observed nose-to-brain passage of the MEVs via the olfactory neurons in the olfactory epithelium (as opposed to via the trigeminal nerve) is advantageous for various reasons that include, for example: the turnover of the mucus in the epithelium of the upper nose cavity (where the olfactory epithelium is located) occurs in days, which allows and supports consistent drug absorption over time; while in the lower nose cavity (where the respiratory epithelium containing the terminals of the trigeminal nerve is located) turnover occurs in minutes.

[0566] The kinetic analysis of distribution from 1 h to 8 h, shows an increasing time-dependent density of MEV in all the regions analyzed from rostral to caudal parts of the brain (FIGS. 21A-31B). Kinetic studies show a strong directionality in the migration of the MEV inside the brain. There is clear movement of the MEVs from the site of entrance in the anterior or frontal part of the brain (the olfactory bulb) to the more posterior or distal parts, all along the axons of the mitral/tufted neurons, the regions they colonize and the secondary regions in their neural network.

[0567] It is known that neuron organelles and mitochondria, as well as endogenous intracellular vesicles (intracellular to the neurons) travel via a well-developed and structured mechanism of axonal transport. The mechanism and underlying structures for axonal transport also are used by viruses, such as, for example, herpes viruses, SARS-COV-2, and others, when they infect the nerves, such as, for example, the olfactory nerve, to move to internal brain structures and expand the infection. Infecting viruses and intracellular neuronal vesicles travelling via axon transport can pass over the synaptic junctions and move from one neuron to another neuron.

[0568] As shown and described herein, MEVs travel intracellularly, via axonal transport, and can cross-over synapses, at least over (i) the synapses between the OSN and the mitral/tufted neurons, (ii) the synapses between the mitral/tufted neurons and the local neurons in the various brain regions colonized by the LOT, and (iii) the synapses between the neurons in the brain regions colonized by the LOT and neurons from the frontal cortex, the hippocampus, and the hypothalamus. Alternative ways of passage from the olfactory epithelium to the brain could have been paracellular transport or transcellular transport; but these kinds of transport are not compatible with the observed data.

[0569] In summary, upon IN administration, MEVs are internalized by the dendrites of the olfactory sensory neurons (OSN) and move intracellularly (inside the olfactory sensory neurons (OSN)) from the olfactory epithelium to the olfactory bulb, through the cribriform plate in the skull. The olfactory nerve (ON), the mitral/tufted neurons, and the lateral olfactory tract (LOT) are the main actors involved in the biodistribution and penetration of the brain by the MEVs. MEVs travel from one brain region to another via axonal transport, and more specifically, along the axons of the mitral/tufted neurons throughput the LOT circuit.

[0570] There is a strong correlation between the brain regions primarily reached by the MEVs upon IN administration, and the regions that are the target sites for some psychoactive drugs, such as psychedelics, such as psilocybin and/or psilocybin derivatives, and other drugs for treating the CNS. MEVs, as described herein, can be used for delivery of cargos, such as psilocybin derivatives, to the target sites in the brain where biological activity as an antidepressant or other activity is elicited.

### 9. Delivery of MEVs Via IN Administration to the Brain-Exemplary Bioactive Cargo and Uses Thereof

[0571] The cargo-loaded MEVs can be used and administered intranasally for treatment of brain disorders, psychiatric disorders, dementia, brain cancers, brain trauma, brain injury, and for treatment of any disease, disorder, or condition in which the brain is involved. The MEVs also can be used for diagnosis to detect brain disorders, such as cancers, and to monitor treatments. In general the MEVs are used for treatment of humans, but they can be used for treatment of animals, as they often suffer from similar or the same brain-associated disorders as humans. For brain delivery, cargo generally comprises molecules (small molecule drugs, proteins, nucleic acids, and others) that affect or treat or detect diseases, disorders, and conditions of the brain and/or CNS.

[0572] Diseases, disorders, and conditions involving the brain, include, for example, human psychiatric disorders, and also animal disorders, including anxiety disorders (panic disorders, social anxiety, phobia-related disorders, and generalized anxiety disorders); attention deficit hyperactivity disorders (inattentive type, hyperactive-impulsive type, combination type); autism spectrum disorders (Asperger's syndrome, Childhood Disintegrative Disorder (CDD), Kanner's syndrome, Pervasive Developmental Disorder (PDD-NOS)); bipolar disorders (Bipolar I disorder, Bipolar II disorder, bipolar with mixed features, bipolar with seasonal pattern major depression, Cyclothymia, rapid cycling bipolar); eating disorders (anorexia nervosa, bulimia nervosa, muscle dysmorphia, binge eating disorder, other specified eating or feeding disorder (OSFED), compulsive over eating, Prader Willi syndrome, Diabulimia, orthorexia nervosa, selective eating, drunkorexia, pregorexia); personality disorders (antisocial personality disorder, borderline personality disorder, histrionic personality disorder, narcissistic personality disorder, avoidant personality disorder, dependent personality disorder, obsessive-compulsive disorder (OCD)); post-traumatic stress disorders (PTSD) (acute stress disorder, uncomplicated PTSD, complex PTSD, comorbid PTSD); schizophrenia (catatonic schizophrenia, disorganized schizophrenia, paranoid schizophrenia, residual schizophrenia, and undifferentiated schizophrenia); other such psychiatric and brain-related conditions.

[0573] The MEVs provide for the delivery, via intranasal administration, and the other routes, as described herein, and expression of active small molecules, proteins, anti-sense oligonucleotide (ASOs), and RNA inside the brain. The MEV cargo for delivery to the brain includes psychoactive agents, enzymes, growth factors, detectable products, such as psilocybin derivatives, harmine, temozolomide, rivastigmine rhodamine (small molecules); catalase, GFP, nerve growth factors (NGFs), TrkA (tropomyosin kinase A), neurotrophic factors (NT-3, NT-4, BDNF (brain derived neurotrophic factor, CNTF (ciliary neurotrophic factor), EPO, IGF-1, bFGF (basic fibroblast growth factor), hGH, or luciferase (proteins); GABAB1A receptor, eGFP or Luciferase (mRNA); GABABIA receptor (siRNA), PTEN (siRNA; SEQ ID NOs: 136-138); miR-17 (miRNA; SEQ ID NOs: 139-141); or MALAT1 (SEQ ID NO:142; lncRNA) into the brain by the IN route. MALATI (SEQ ID NO: 142), a metastasis associated lung adenocarcinoma transcript 1, is a long non-coding RNA (Inc RNA). In the brain, over-expression of long noncoding RNA MALATI ameliorates traumatic brain injury induced brain edema by inhibiting AQP4 and the NF-κB/IL-6 pathway (see, e.g., Zhang et al., first published 19 Jun. 2019, J. Cellular Biochemistry 120 (10): 17584-17592, doi.org/10.1002/jcb.29025).

[0574] Cargo for delivery in the MEVs can comprise any of the following single molecules, or in combination, for treatment of any of the above conditions, for example: 5-hydroxytryptamine-1A (5-HT1A) and 5-hydroxytryptamine-3 (5-HT3) receptor agonists, for example, Azapirones, Methylphenidate, Dexmethylphenidate, Ondansetron (Zofran®, GlaxoSmithKline); Acetylcholinesterase inhibitors, for example, Donepezil, Galantamine, Rivastigmine; Alpha-1-receptor antagonists, for example, Prazosin; Anticonvulsants, for example, Gabapentin, Pregabalin, Topiramate (sold under the trademark Topamax®, Ortho-McNeil Pharmaceutical), Carbamazepine, Eslicarbazepine, Levetiracetam, Licarbazepine, Oxcarbazepine, Valproic acid and derivatives, Lamotrigine; Anti-inflammatory drugs and supplements of various mechanisms, including non-steroidal anti-inflammatory drugs (NSAIDs) and selective and non-selective COX-2 inhibitors, for example, celecoxib, acetylsalicylic acid (Aspirin), ibuprofen, and naproxen, Infliximab, Omega-3 polyunsaturated fatty acids, Pioglitazone, TNF-alpha inhibitors, N-Acetyl-Cysteine, Dexamethasone, Minocycline; Antipsychotics, for example, Aripiprazole, Asenapine, Cariprazine, Chlorpromazine, Clozapine, Haloperidol, Lumateperone tosylate (Caplyta®, Intra-Cellular Therapies), Olanzapine, Paliperidone, Quetiapine, Risperidone, Ziprasidone; Beta blockers, for example, Azapirones, Propranolol. Drugs that modulate the cholinergic system, for example, Biperiden, scopolamine; Corticotropin Releasing Factor (CRF) antagonists; Drugs that modulate the GABAergic system, for example, Benzodiazepine, Brexanolone, Sage-217; Glucocorticoid receptor agonists, for example, Hydrocortisone; Drugs involved in glutamatergic modulation, for example, AGN-241751, AV-101, AVP-786, AVP-923, AXS-05, D-cycloserine, Dextromethorphan, Rapastinel; Glycine, and glycine reuptake inhibitors, for example, Sarcosine; Drugs that modulate the hypothalamic-pituitary-adrenal (HPA) axis, for example, Fludrocortisone, Metyrapone, Mifepristone, and probiotics; Drugs that modulate the Kynurenine Pathway (KP); Drugs that modulate the limbic and paralimbic brain areas, for example, Cannabidiol (CBD); Drugs that modulate the melatonergic system, for example, Agomelatine; Fatty acids, peptides, nucleic acids and other precursor molecules, for example, alpha-omega fatty acids, Coenzyme Q10, Myo-inositol, Methylfolate, S-adenosylmethionine, Cysteamine, and Oxytocin; Monoamine oxidase inhibitors (MAOIs), for example, Isocarboxazid (Marplan®, Validus Pharmaceuticals, Inc.), Phenelzine (Nardil®, Warner-Lambert Pharmaceutical Company), Selegiline (Emsam®, Somerset Pharmaceuticals, Inc.), and Tranylcypromine (Parnate®, GlaxoSmithKline); Mood stabilizers, for example, lithium salts, Valproate, Ebselen, and Divalproex; Multimodal antidepressants, for example Vilazodone and Vortioxetine; N-Nitrosodimethylamine (NDMA)-receptor antagonists, for example, Amantadine, Arketamine, Ketamine, Memantine, Riluzole, Esketamine; Neurokinin-1 (NK1) receptor antagonists; Neuropeptide Y (NPY) receptor agonists; Drugs with Neurotrophic effects, Cilostazol, Sildenafil, and Vildagliptin; Norepinephrine-dopamine reuptake inhibitors (NDRIs), Bupropion (Wellbutrin®, GlaxoSmithKline; Zyban®, Glaxo Group Ltd.; Aplenzin®, Biovail Laboratories International); Drugs that act on the opiate system, for example, ALKS-5461, AZD2327, BTRX-246040 (LY2940094), Buprenorphine, JNJ-67953964, Nalmefene, and Naltrexone; Protein Kinase C inhibitors or anti-estrogen drugs, for example, Endoxifen, Tamoxifen, and Verapamil; Psychedelic drugs, for example, 3,4-methylenedioxymethamphetamine (MDMA), Ayahuasca, Lysergic acid diethylamide (LSD), psilocybin and/or derivatives thereof; Selective serotonin reuptake inhibitors (SSRIs), for example, Citalopram (Celexa®, Forest Laboratories Inc.), Escitalopram (Lexapro®, Forest Laboratories Inc.), Fluvoxamine, Paroxetine (Paxil; GlaxoSmithKline; Pexeva®, Synthon Pharmaceuticals Inc.), and Sertraline (Zoloft®, Pfizer); Selective norepinephrine transporter inhibitors, for example, Atomoxetine; Serotonin-norepinephrine reuptake inhibitors (SNRIs), for example, Desvenlafaxine (Pristiq®, Wyeth Corporation), Duloxetine (Cymbalta®, Eli Lily and Company), Levomilnacipran (Fetzima®, Forest Laboratories Inc.), and Venlafaxine; Stimulants, including adenosine receptor antagonists, and alpha-2-adrenergic receptor agonists, for example, Caffeine, Clonidine, Guanfacine, Extended Release amphetamines XR-OS, Dextroamphetamine sulfate, Lisdexamfetamine, Methamphetamine, Mixed amphetamine salts, Racemic amphetamine sulfate, and Triple-bead mixed amphetamine salts; Substance P-antagonists, for example, MK-0869; Tricyclic serotonin-norepinephrine reuptake inhibitors, for example, Amitriptyline (Elavil®, Merck and Co.), Amoxapine, Buspirone (Buspar, Bristol Meyers Squibb), Clomipramine, Desipramine (Norpramin®, Lakeside Laboratories Inc.; Aventis, Aventis Corporation), Doxepin, Imipramine (Tofranil®, Mallinckrodt LLC; Ciba Geigy, Maria Sistro), Maprotiline, Nortriptyline (Pamelor, American Home Products of Delaware), Protriptyline, and Trimipramine; and Vasopressin 1B (V1B) receptor antagonists, for example, SSR149415.

[0575] Thus, the MEVs, via IN administration can deliver therapeutic and diagnostic molecules that include peptides, small peptides, proteins, polypeptides, nucleic acids, and small molecules. Such cargo includes, but is not limited to, anti-cancer therapeutics and diagnostics, psychoactive molecules, such as psilocybin/psilocin, other molecules including harmine, temozolomide, rivastigmine, rhodamine (small molecules); catalase, GFP, nerve growth factors (NGFs), TrkA (tropomyosin kinase A), neurotrophic factors (NT-3, NT-4, BDNF (brain derived neurotrophic factor, CNTF (ciliary neurotrophic factor), EPO, IGF-1, bFGF (basic fibroblast growth factor), hGH, and luciferase (proteins), to the brain by the IN route using any kind of EVs. The expression, in the brain, of an active mRNA, siRNA, or miRNA for GABABIA receptor, eGFP and Luciferase (mRNA); nerve growth factors (NGFs), TrkA (tropomyosin kinase A), neurotrophic factors (NT-3, NT-4, BDNF (brain derived neurotrophic factor, CNTF (ciliary neurotrophic factor), EPO, IGF-1, bFGF (basic fibroblast growth factor), hGH, GABABIA receptor (siRNA), PTEN (siRNA); miR-17 (miRNA); and MALAT1 (lncRNA) carried by the EVs as a payload. MALATI can be used to treat brain injury and trauma; it also is over-expressed in some conditions, such as cancer, and can be a target for inhibition.

[0576] Of interest is delivery of psychoactive drugs for treatment of psychiatric and other such disorders. Exemplary bioactive molecules and drugs that can be loaded in MEVs for such treatments are set forth in the following table.

| | Drug Classification or Mechanism | |
|---|---|---|
| Bioactive molecule or Drug | of Action | Condition(s) |
| 3,4-methylenedioxymeth- | Psychedelic; induces short-term | Anxiety, Bipolar |
| amphetamine (MDMA; “ecstasy”) | release of serotonin, dopamine, and/or | Disorder, |
| | norepinephrine | Schizophrenia |
| 5-hydroxytryptamine (5-HT₁) | Agonizes 5-hydroxytryptamine | Schizophrenia |
| receptor agonists | receptors or serotonin receptors | |
| AGN-241751 | Glutamatergic modulation | Depression |
| Agomelatine | Modulates melatonergic system | Depression |
| ALKS-5461 | Opiate system | Depression |
| Amantadine | NDMA-receptor antagonist | Autism |
| Amitriptyline (Elavil ®, Merck | Tricyclic: serotonin-norepinephrine | Anxiety, |
| and Co.) | reuptake inhibitors | Depression, Eating |
| | | Disorders |
| Amoxapine | Tricyclic: serotonin-norepinephrine | Anxiety, Depression |
| | reuptake inhibitors | |
| Amphetamines: | Stimulant; Increases dopamine and | ADHD |
| (Extended Release amphetamines | norepinephrine; inhibits monoamine | |
| XR-OS, EROS; | oxidase; interacts with ACH, 5-HT, | |
| Dextroamphetamine sulfate; | opioid, and glutamate pathways | |
| Lisdexamfetamine; | | |
| Methamphetamine; Mixed | | |
| amphetamine salts; Racemic | | |
| amphetamine sulfate; Triple-bead | | |
| mixed amphetamine salts) | | |
| Aripiprazole | Anti-psychotic | Autism, Bipolar |
| | | Disorder, Borderline |
| | | Personality Disorder, |
| | | Schizophrenia |
| Arketamine | NDMA-receptor antagonist; | Bipolar Disorder |
| | Glutamatergic modulation | |
| Asenapine | Anti-psychotic | Bipolar Disorder, |
| | | Schizophrenia |
| Aspirin | Anti-inflammatory; COX-1 and COX- | Bipolar Disorder, |
| | 2 inhibitor | Depression |
| Atomoxetine | Selectively inhibits NE transporter; | ADHD |
| | increases extracellular synaptic levels | |
| | of NE and dopamine in prefrontal | |
| | cortex | |
| AV-101 | Glutamatergic modulation | Depression |
| AVP-786 | Glutamatergic modulation | Depression |
| AVP-923 | Glutamatergic modulation | Depression |
| AXS-05 | Glutamatergic modulation | Depression |
| Ayahuasca | Psychedelic effects-Multiple | Depression |
| | mechanisms | |
| Azapirones | 5-HT_{1A} agonists | Anxiety |
| AZD2327 | Opiate system | Depression |
| Benzodiazepines | GABAergic system | Anxiety, Bipolar |
| | | Disorder |
| Beta blockers/Azapirones | Beta blockers | Anxiety |
| Biperiden | Cholinergic system | Depression |
| Brexanolone | GABAergic system | Depression |
| BTRX-246040 (former | Opiate system | Depression |
| LY2940094) | | |
| Buprenorphine | Opiate system | Depression |
| Bupropion (Wellbutrin ®, | norepinephrine-dopamine reuptake | Anxiety, Depression |
| Zyban ®, Aplenzin ®) | inhibitors (NDRIs) | |
| Buspirone (Buspar ™, Bristol | Tricyclic: serotonin-norepinephrine | Depression, Eating |
| Myers Squibb) | reuptake inhibitors | disorders |
| Caffeine | Stimulant, antagonism of adenosine | OCD |
| | receptors | |
| Cannabidiol (CBD) | Acts directly on limbic and paralimbic | Anxiety |
| | brain areas | |
| Carbamazepine | Anticonvulsants | Bipolar Disorder |
| Cariprazine | Anti-psychotic | Bipolar Disorder, |
| | | Schizophrenia |
| Celecoxib | Anti-inflammatory; COX-2 inhibitor | Bipolar Disorder |
| Chlorpromazine | Anti-psychotic | Bipolar Disorder, |
| | | Schizophrenia |
| Cilostazol | Neurotrophic effects | Depression |
| Citalopram (Celexa ®) | Selective Serotonin Reuptake | Anxiety, |
| | Inhibitor (SSRI) | Depression, OCD, |
| | | PTSD |
| Clomipramine | Tricyclic: serotonin-norepinephrine | OCD, Autism |
| | reuptake inhibitors | |
| Clonidine | Stimulant; α-2 receptor agonists | Autism |
| Clonidine-XR | Stimulates post-synaptic α-2- | ADHD |
| | adrenergic receptors | |
| Clozapine | Anti-psychotic | Bipolar Disorder, |
| | | Schizophrenia, |
| | | Autism |
| Coenzyme Q10 | Miscellaneous; Anti-oxidant, aides in | Bipolar Disorder |
| | metabolism | |
| Corticotropin Releasing Factor | Corticotropin Releasing Factor (CRF) | Anxiety |
| (CRF) antagonists | antagonists | |
| Cysteamine | Miscellaneous; Precursor Molecule; | Depression |
| | Neurotrophic effects | |
| D-cycloserine | Glutamatergic modulation | Depression |
| Desipramine (Norpramin ®) | Tricyclic: serotonin-norepinephrine | Anxiety, Depression |
| | reuptake inhibitors | |
| Desipramine (Norpramin ®, | Tricyclic: serotonin-norepinephrine | Eating disorders |
| Aventis) | reuptake inhibitors | |
| Desvenlafaxine (Pristiq ®) | serotonin-norepinephrine reuptake | Anxiety, Depression |
| | inhibitors (SNRIs) | |
| Dexamethasone | anti-inflammatory, | PTSD |
| | immunosuppressive; antiemetic | |
| Dextromethorphan | Glutamatergic modulation | Depression |
| Divalproex | Mood stabilizers | Borderline |
| | | Personality Disorder |
| Donepezil | Acetylcholinesterase inhibitors | Autism |
| Doxepin | Tricyclic: serotonin-norepinephrine | Anxiety, Depression |
| | reuptake inhibitors | |
| Duloxetine (Cymbalta ®) | serotonin-norepinephrine reuptake | Anxiety, |
| | inhibitors (SNRIs) | Depression, |
| | | Borderline |
| | | Personality Disorder |
| Ebselen | Mood stabilizer; Lithium mimetic | Bipolar Disorder |
| Endoxifen | Protein Kinase C inhibitor, anti- | Bipolar Disorder |
| | estrogen | |
| Escitalopram (Lexapro ®) | Selective Serotonin Reuptake | Anxiety, |
| | Inhibitor (SSRI) | Depression, OCD, |
| | | PTSD, Autism |
| Esketamine | NDMA-receptor antagonist; | Bipolar Disorder, |
| | Glutamatergic modulation; mu-opioid | Depression |
| Eslicarbazepine | Anticonvulsants | Bipolar Disorder |
| Fludrocortisone | Hypothalamic-Pituitary-Adrenal | Depression |
| | (HPA) axis | |
| Fluoxetine (Prozac ®) | Selective serotonin | Anxiety, |
| | | Depression, |
| | | Borderline |
| | | Personality |
| | | Disorder, OCD, |
| | | PTSD, Autism, |
| | | Eating Disorders |
| Fluvoxamine | Selective Serotonin Reuptake | Depression, OCD, |
| | Inhibitor (SSRI) | Autism |
| Gabapentin | Alpha-delta calcium channel | Anxiety, PTSD |
| | anticonvulsants | |
| Galantamine | Acetylcholinesterase inhibitors | Autism |
| Glycine | Miscellaneous; Amino acid, precursor | OCD |
| | molecule | |
| Guanfacine-XR | Stimulates post-synaptic alpha-2A- | ADHD |
| | adrenergic receptors | |
| Guanfacine | Stimulant; Alpha-2 receptor agonists | Autism |
| Haloperidol | Anti-psychotic | Bipolar Disorder, |
| | | Borderline |
| | | Personality Disorder |
| Hydrocortisone | Glucocorticoid receptor agonists | PTSD |
| ibuprofen | Anti-inflammatory; COX-1 and COX- | Bipolar Disorder, |
| | 2 inhibitor | Depression |
| Imipramine (Tofranil ®, Ciba | Tricyclic: serotonin-norepinephrine | Anxiety, |
| Geigy) | reuptake inhibitors | Depression, Eating |
| | | disorders |
| Infliximab | Anti-inflammatory; TNF alpha | Depression |
| | inhibitor; Immune/inflammatory | |
| | system | |
| Isocarboxazid (Marplan ®) | monoamine oxidase inhibitors | Anxiety, Depression |
| | (MAOIs) | |
| JNJ-67953964 | Opiate system | Depression |
| Ketamine | NDMA-receptor antagonist; | Anxiety, |
| | Glutamatergic modulation | Depression, OCD, |
| | | PTSD, Bipolar |
| | | Disorder |
| Lamotrigine | Anticonvulsants; modulates neuronal | Bipolar Disorder, |
| | glutamate levels | OCD, Autism |
| Levetiracetam | Anticonvulsants | Autism |
| Levomilnacipran (Fetzima ®) | serotonin-norepinephrine reuptake | Anxiety, Depression |
| | inhibitors (SNRIs) | |
| Licarbazepine | Anticonvulsants | Bipolar Disorder |
| Lithium salts | Mood stabilizer | Bipolar Disorder |
| lumateperone tosylate (Caplyta ®) | Anti-psychotic | Bipolar Disorder, |
| | | Schizophrenia |
| Lysergic acid diethylamide (LSD) | Psychedelic effects-Multiple | Anxiety, Depression |
| | mechanisms | |
| Memantine | NDMA-receptor antagonist; | Bipolar Disorder, |
| | Glutamatergic modulation | Autism, OCD |
| Methylfolate supplementation | Miscellaneous; Precursor molecule, | Depression |
| | nutritional supplement | |
| Methylphenidate: | 5-HT1a receptor agonist; psycho- | ADHD, Autism |
| Dexmethylphenidate ® | stimulant | |
| Metyrapone | Hypothalamic-Pituitary-Adrenal | Depression |
| | (HPA) axis | |
| Mifepristone | Hypothalamic-Pituitary-Adrenal | Depression |
| | (HPA) axis | |
| Minocycline | Anti-inflammatory; Immune | Bipolar Disorder, |
| | Modulator; Alpha-2 receptor | Depression, OCD, |
| | antagonist; Activation of immune | Anxiety |
| | system | |
| MK-0869 | Substance P antagonism | Depression |
| Myo-inositol | Miscellaneous; Precursor molecule, | OCD |
| | can stimulate glucose uptake and | |
| | decrease blood sugar levels. | |
| N-Acetyl-Cysteine | Anti-inflammatory, anti-oxidant with | Bipolar Disorder, |
| | glutamate-modulating properties | OCD |
| Nalmefene | Opiate system | Borderline |
| | | Personality Disorder |
| Naltrexone | Opiate system | Depression, Autism, |
| | | Borderline |
| | | Personality Disorder |
| Naproxen | Anti-inflammatory; COX-1 and COX- | Bipolar Disorder, |
| | 2 inhibitor | Depression |
| Neurokinin-1 (NK₁) antagonists | Neurokinin-1 NK(sub. 1) antagonists | Anxiety, Depression |
| Neuropeptide-Y (NPY) receptor | Neuropeptide Y (NPY) receptor | Anxiety, Bipolar |
| agonists | agonists | Disorder, |
| | | Depression, PTSD |
| Nortriptyline (Pamelor ™) | Tricyclic: serotonin-norepinephrine | Anxiety, Autism, |
| | reuptake inhibitors | Depression |
| Olanzapine | Anti-psychotic | Bipolar Disorder, |
| | | Borderline |
| | | Personality |
| | | Disorder, PTSD, |
| | | Schizophrenia |
| Omega-3 Polyunsaturated Fatty | Anti-inflammatory | Borderline |
| Acids; Fish oil | | Personality |
| | | Disorder, |
| | | Depression, PTSD |
| Ondansetron (Zofran ®) | 5-HT3 receptor agonist; Anti-emetic | OCD, Eating |
| | | Disorders |
| Oxcarbazepine | Anticonvulsants | Bipolar Disorder |
| Oxytocin | Miscellaneous; Prosocial | Anxiety, Autism, |
| | Neuropeptide | Depression, PTSD, |
| | | Schizophrenia |
| Paliperidone | Anti-psychotic | Bipolar Disorder, |
| | | Borderline |
| | | Personality |
| | | Disorder, |
| | | Schizophrenia |
| Paroxetine (Paxil ®, Pexeva ®) | Selective Serotonin Reuptake | Anxiety, Autism, |
| | Inhibitor (SSRI) | Depression, OCD, |
| | | PTSD |
| Phenelzine (Nardil ®) | monoamine oxidase inhibitors | Anxiety, Depression |
| | (MAOIs) | |
| Pioglitazone | Anti-inflammatory | Bipolar Disorder |
| Prazosin | Alpha1-Adrenergic receptor | PTSD |
| | antagonist | |
| Pregabalin | Anticonvulsant | Anxiety |
| Probiotics | Hypothalamic-Pituitary-Adrenal | Anxiety, Bipolar |
| | (HPA) axis | Disorder, |
| | | Depression |
| Propanolol | Blocks beta 1&2 adrenergic receptors | PTSD |
| Protriptyline | Tricyclic: serotonin-norepinephrine | Anxiety, Depression |
| | reuptake inhibitors | |
| Psilocybin | Psychedelic effects-Multiple | Anxiety, Depression |
| | mechanisms | |
| Quetiapine | Anti-psychotic | Anxiety, Bipolar |
| | | Disorder, Borderline |
| | | Personality Disorder |
| Rapastinel | Glutamatergic modulation | Depression |
| Riluzole | NDMA-receptor antagonist; | Anxiety, OCD |
| | Glutamatergic modulation | |
| Risperidone | Anti-psychotic | Anxiety, Autism, |
| | | Bipolar Disorder, |
| | | OCD, PTSD, |
| | | Schizophrenia |
| Rivastigmine | Acetylcholinesterase inhibitors | Autism |
| S-adenosylmethionine (SAMe) | Miscellaneous; Precursor molecule | Depression |
| SAGE-217 | GABAergic system | Depression |
| Sarcosine | Glycine reuptake inhibitor | OCD |
| Scopolamine | Cholinergic system | Depression |
| Selegiline (Emsam ®) | monoamine oxidase inhibitors | Anxiety, Depression |
| | (MAOIs) | |
| Sertraline (Zoloft ®) | Selective Serotonin Reuptake | Anxiety, Autism, |
| | Inhibitor (SSRI); Atypical Anti- | Borderline |
| | psychotic | Personality |
| | | Disorder, OCD, |
| | | PTSD |
| Sildenafil | Neurotrophic effects | Depression |
| SSR149415 | Vasopressin 1b receptor antagonist | Depression |
| Tamoxifen | Protein Kinase C inhibitor, anti- | Bipolar Disorder |
| | estrogen | |
| TNF-α inhibitor | Anti-inflammatory | Bipolar Disorder |
| Topiramate (Topamax ®) | Anticonvulsant; modulates neuronal | Bipolar disorder, |
| | glutamate levels | Eating Disorders, |
| | | OCD, PTSD |
| Tranylcypromine (Parnate ®) | monoamine oxidase inhibitors | Anxiety, Depression |
| | (MAOIs) | |
| Trimipramine. Tetracyclic: | Tricyclic: serotonin-norepinephrine | Anxiety |
| Maprotiline | reuptake inhibitors | |
| Valproate | Mood stabilizer | Bipolar Disorder |
| Valproic acid and derivatives | Anticonvulsants | Autism, Bipolar |
| | | Disorder, Borderline |
| | | Personality Disorder |
| Vasopressin (V1B) antagonists | Vasopressin (V1B) antagonists | Anxiety, Depression |
| Venlafaxine | serotonin-norepinephrine reuptake | Anxiety, Autism, |
| | inhibitors (SNRIs) | Depression, OCD, |
| | | PTSD |
| Verapamil | Protein Kinase C inhibitor, anti- | Bipolar Disorder |
| | estrogen | |
| Vilazodone | Multimodal antidepressant effect | Depression |
| Vildagliptin | Neurotrophic effects | Depression |
| Vortioxetine | Multimodal antidepressant effect | Depression |
| Ziprasidone | Anti-psychotic | Bipolar Disorder, |
| | | Schizophrenia |

[0577] Thus provided herein are methods for using MEVs for the delivery of drugs, via intranasal administration, for the treatment of psychiatric conditions, brain diseases, disorders, and conditions of the CNS. As an example, the table below summarizes: (1) the brain regions reported to be sites of action for the biological activity of psilocybin (or derivatives) and other psychedelics; and (2) regions that are also targeted by MEVs when administered by the IN route.

TABLE
Neuroanatomy of brain areas targeted by hallucinogens and MEVs

| | MEV | | |
|---|---|---|---|
| Brain area | density | Psychedelic drug target | References |
| Olfactory bulb | +++ | Existence of binding sites with | (Grailhe et al. (1999) Neuron |
| | | high affinity for [125I]LSD | 22(3): 581-591; Increased |
| | | that correspond to 5-HT5A | Exploratory Activity and Altered |
| | | receptors and that are | Response to LSD in Mice Lacking |
| | | concentrated in the olfactory | the 5-HT5A Receptor) |
| | | bulb, neocortex, and medial | |
| | | habenula | |
| Primary motor | + | A single dose of psilocybin | (Shao, Liao et al. (2021) Neuron |
| cortex | | triggers dendritic remodeling, | 109(16): 2535-2544; Psilocybin |
| | | enhances excitatory | induces rapid and persistent growth |
| | | neurotransmission in the | of dendritic spines in frontal cortex |
| | | medial prefrontal cortex | in vivo) |
| Piriform cortex | ++ | SD and DOI act as highly | (Marek and Aghajanian (1996) Eur. |
| | | potent partial agonists at | J. Pharmacol. 305(1-3): 95-100; |
| | | cortical 5HT21 receptors in the | Alpha 1B-adrenoceptor-mediated |
| | | piriform cortical cortex | excitation of piriform cortical |
| | | | interneurons) |
| Frontal cortex | + | We found that a single dose of | (Shao et al. (2021) Neuron |
| | | psilocybin led to | 109(16): 2535-2544; Psilocybin |
| | | approximately 10% increases | induces rapid and persistent growth |
| | | in spine size and density, | of dendritic spines in frontal cortex |
| | | driven by an elevated spine | in vivo) |
| | | formation rate. The structural | |
| | | remodeling occurred quickly | |
| | | within 24 h and was persistent | |
| | | 1 month later. | |
| | | Studies show that a single | (de Vos et al. (2021) Frontiers in |
| | | administration of a psychedelic | Psychiatry 12: 724606; Psychedelics |
| | | produces rapid changes in | and Neuroplasticity: A Systematic |
| | | plasticity mechanisms on a | Review Unraveling the Biological |
| | | molecular, neuronal, synaptic, | Underpinnings of Psychedelics) |
| | | and dendritic level. | |
| Agranular | + | Psilocybin and ketamine | (Davoudian, Shao et al. (2022) |
| insular cortex | | produced acutely comparable | bioRxviv, doi: |
| | | elevations in c-Fos expression | doi.org/10.1101/2022.03.18.484437; |
| | | in numerous brain regions, | Shared and distinct brain regions |
| | | including anterior cingulate | targeted for immediate early gene |
| | | cortex, locus coeruleus, | expression by ketamine and |
| | | primary visual cortex, central | psilocybin) |
| | | and basolateral amygdala, and | |
| | | claustrum | |
| Primary | + | The region containing the | (Lopez-Gimenez and Gonzalez- |
| somatosensory | | highest density of 5- | Maeso (2018) Curr. Top Behav. |
| cortex | | HT_{2A} binding sites was the | Neurosci. 36: 45-73; Hallucinogens |
| | | neocortex, where the | and Serotonin 5-HT2A Receptor- |
| | | autoradiographic signal | Mediated Signaling Pathways) |
| | | displayed a banded pattern | |
| | | corresponding predominantly | |
| | | to pyramidal neurons | |
| | | distributed according to the | |
| | | cytoarchitectural organization | |
| | | of different cortical areas | |
| Auditory cortex | + | Psychedelic drugs also have | (Barrett et al. (2018) Intl. Rev. |
| | | notable effects on the | Psychiatry 30(4): 350-362; |
| | | perception of music. This is | Psychedelics and music: |
| | | not surprising, as | neuroscience and therapeutic |
| | | 5HT_{2A} signaling has been | implications) |
| | | shown to alter neuronal | |
| | | responses to auditory stimuli | |
| | | from the cochlear nucleus | |
| | | along the precortical primary | |
| | | auditory sensory pathway | |
| | | through to primary auditory | |
| | | cortex | |
| | | LSD enhances the emotional | (Kaelen et al. (2015) |
| | | response to music. | Psychopharmacology (Berl) |
| | | | 232(19): 3607-14; LSD enhances the |
| | | | emotional response to music) |
| | | Single oral administration of | (Preller et al. (2017) Curr. Biol. |
| | | LSD (100 μg) increased blood | 27(3): 451-457; The Fabric of |
| | | oxygen-level in the prefrontal | Meaning and Subjective Effects in |
| | | cortex in response to music, | LSD-Induced States Depend on |
| | | suggesting an exaggerated | Serotonin 2A Receptor Activation) |
| | | activity in brain regions related | |
| | | to personal relevance | |
| | | processing | |
| Retrosplenial | + | Correlation of psilocybin's | (Davoudian et al. (2022) bioRxviv, |
| granular cortex | | effects with gene expression | doi.org/10.1101/2022.03.18.484437; |
| | | highlighted potential roles of | Shared and distinct brain regions |
| | | 5-HT2A and GluN2B subunit | targeted for immediate early gene |
| | | of NMDA receptors | expression by ketamine and |
| | | | psilocybin) |
| Temporal | + | | |
| association | | | |
| cortex | | | |
| Ectorhinal | + | | |
| cortex | | | |
| Amygdaloid | +++ | Acute treatment with | (Krachenmann et al. (2015) Biol. |
| nucleus | | psilocybin decreased amygdala | Psychiatry 78(8): 572-581; |
| | | reactivity during emotion | Psilocybin-Induced Decrease in |
| | | processing and that this was | Amygdala Reactivity Correlates |
| | | associated with an increase of | with Enhanced Positive Mood in |
| | | positive mood in healthy | Healthy Volunteers) |
| | | volunteers | |
| | | The administration of LSD | (Mueller et al. (2017) Transl. |
| | | reduced reactivity of the left | Psychiatry 7(4): e1084; Acute effects |
| | | amygdala and the right medial | of LSD on amygdala activity during |
| | | prefrontal cortex relative to | processing of fearful stimuli in |
| | | placebo during the | healthy subjects) |
| | | presentation of fearful faces | |
| | | LSD administration produced | (Gresch et al. (2002) Neuroscience |
| | | a five- to eight-fold increase in | 114(3): 707-713; Lysergic acid |
| | | Fos-like immunoreactivity in | diethylamide-induced |
| | | medial prefrontal cortex, | Fos expression in rat brain: role of |
| | | anterior cingulate cortex, and | serotonin-2A Receptors) |
| | | central nucleus of amygdala. | |
| | | Thus, we show psilocybin's | (Grimm et al. (2018) Eur. Neuro- |
| | | effect as a modulator of major | psychopharmacol. 28(6): 691-700; |
| | | connectivity hubs of the | Psilocybin modulates functional |
| | | amygdala. | connectivity of the amygdala during |
| | | | emotional face discrimination) |
| | | Local infusion of the 5-HT2A | (Pedzich et al. (2022) |
| | | receptor antagonist M100907 | Neuropsychopharmacology |
| | | into the amygdala reversed the | 47: 1304-1314; Effects of a |
| | | effect of systemic | psychedelic 5-HT2A receptor |
| | | administration of DOI on fear | agonist on anxiety-related behavior |
| | | expression while local | and fear processing in mice) |
| | | administration of DOI into the | |
| | | amygdala was sufficient to | |
| | | suppress fear expression. | |
| | | The correlation of fear | (Dolder et al. (2016) Neuropsycho- |
| | | perception and amygdala | pharmacology 41(11): 2638-2646; |
| | | reactivity may be useful during | LSD Acutely Impairs Fear |
| | | psychotherapy. | Recognition and Enhances |
| | | | Emotional Empathy and Sociality) |
| Arcuate | +++ | | |
| hypothalamic | | | |
| nucleus | | | |
| Mammillary | +++ | Rat brain exhibited a high | (Watts et al. (1994) Neurochem. Intl. |
| nucleus | | level of specific binding of | 24(6): 565-574; Autoradiographic |
| | | [125I]LSD in the tenia tecta | comparison of [125I]LSD-labeled 5- |
| | | and mammillary nuclei. | HT2A receptor distribution in rat |
| | | | and guinea pig brain) |
| | | High concentrations of | (Nakada et al. (1984) Neuroscience |
| | | [¹²⁵I]LSD sites were observed | Letters 49(1-2): 13-18; Localization |
| | | in layer IV of the cerebral | and characterization by quantitative |
| | | cortex, caudate-putamen, | autoradiography of [125I]LSD |
| | | claustrum, olfactory tubercle, | binding sites in rat brain) |
| | | nucleus accumbens, | |
| | | ependyma, mammillary | |
| | | nucleus and inferior olive. | |

[0578] Because the target regions for psychedelics and the target regions for MEVs upon IN administration coincide, it is described and shown herein that this can be exploited for treatment of psychiatric and other diseases, disorders, and conditions that are or can be treated by administration of a psychedelic. Disorders responsive to treatment by psychedelics include, but are not limited to, PTSD and depression, among others. Advantages that are associated with the administration of therapeutical psychedelics by means of MEV-mediated nose-to-brain delivery, include, but are not limited to, the following:
[0579] 1) Direct entry to the brain avoids passage through the blood stream, which leads to systemic exposure of the entire body, degradation, metabolism, and clearance by filtering organs (liver, kidneys).
[0580] 2) Protection of psilocybin and/or derivatives thereof against oxidative inactivation in the body (kidney, intestinal mucosa).
[0581] 3) Avoidance of undesirable effects in the gastrointestinal tract (the gastrointestinal tract is among the tissues with the highest level of expression of the 5-HT2 receptor) and other organs (liver, kidneys, and cardiovascular system) expressing levels of the receptor that are significantly higher than those in the brain.
[0582] 4) Better control of the timing involved in the process (from the administration of the drug to the end of the treatment), and lower variability from patient to patient due to the fluctuations introduced by the oral administration and the passage through the gastrointestinal tract, and blood.

[0583] As shown herein, MEV-mediated delivery provides entry to the brain via the olfactory nerve, resulting in the distribution of a psychoactive drug, such as psilocybin and/or derivatives thereof, via the mitral/tufted axons throughout the olfactory tract, and, accordingly, directly to the relevant brain regions. Thus provided herein are methods for using MEVs for the delivery of psychiatric drugs such as psychedelics and others, via intranasal administration, for the treatment of psychiatric conditions.

### I. Mev-Mediated Intracellular Signaling

[0584] Other in vivo therapeutic targets, in general, not limited to the brain, include receptors that are involved in a disease, disorder, or condition. These include cell surface receptors, and internalized receptors, in which the MEVs deliver agonists, antagonists, ligands, or other modulators of activity. Targets of interest include, for example, modulation of toll-like receptors (TLRs) and other receptors, including receptors, such as the TLRs, that are internalized. Such receptors are internalized into vesicles and can interact with ligands delivered by MEVs. This is exemplified in the Examples in which the ligand flagellin is delivered into cells via MEVs; flagellin activates TLR-5, which in turn activations inflammatory cytokines.

[0585] Flagellin is a conserved protein, a component of the bacterial flagellum in mobile bacteria. The immune systems in plants and in animals that assure the defense against bacterial infections are set to recognize flagellin, or subrogate peptides thereof, and to react against the invading bacteria. Thus, the presence of bacteria, their flagella, or of fragments thereof triggers a signaling pathway, that leads to a reaction of the host to the putative infection agent. In plants, flagellin is recognized by the FLS2 receptor (Flagellin Sensing 2 receptor). For instance, the presence of flagellin, or of surrogate peptides of it, is detected by the leaf epithelium that surrounds the stomata (the respiratory pores on the surface of the leaves). Open stomata are entry doors into the leaf parenchyma for infective agents such as flagellin-bearing bacteria. When the presence of flagellin is detected in the leaf epithelium, the plant triggers an immune response, which includes the immediate closing of the stomata in order to physically prevent the entry of bacteria thereby. The signaling pathway, that starts by the detection of flagellin (or of subrogate peptides) and ends with the closing of the stomata, is triggered by the binding of flagellin (or of subrogate peptides) to the FLS2 receptor. The transmembrane protein receptor, FLS2, is the very first component in the signaling pathway. In Arabidopsis thaliana, a species commonly used as a plant model, the FLS2 receptor is found in the plasma membrane and in the membranes of endosomal vesicles inside the plant cell (see, Beck et al., (2012) The Plant cell 24 (10): 4205-4219 and Otegui et al. (2008) Traffic (Copenhagen, Denmark) 9 (10): 1589-1598). The flagellin binding domains are oriented either to the “extracellular space” (for the FLS2 molecules located in the plasma membrane); or to the “intra-endosomal space” (for the FLS2 molecules located in intracellular endosomal vesicles). The FLS2 domains in charge of the triggering of the signaling pathway are in both cases oriented towards the cytoplasmic side of the membranes. Thus, it can be expected that a signaling pathway and the subsequent biological immune response triggered by the binding of flagellin (or of a subrogate peptide) to FLS2 are indistinguishable whether the triggering FLS2 is located in the plasma membrane and detects flagellin in the cell surface or located in an endosomal vesicle and detects flagellin from within the same endosomal vesicle. Although, it is straightforward for FLS2 located in the plasma membrane to identify and bind to flagellin (or to subrogate peptides), it is less likely to expect that FLS2 will find flagellin (or a subrogate peptide) inside the endosomal vesicle where the intracellular FLS2 form is located. Experiments shown in the working Examples herein, demonstrate that MEVs that have been loaded with flp22, a subrogate peptide of flagellin, can trigger the expected biological immune reaction, i.e. the immediate closing of the stomata, presumably by the delivery of the bioactive peptide straight into the endosomal vesicles where FLS2 is located. As flp22-loaded MEVs are treated with proteases to destroy any trace of external flp22 that may remain, if exo-loaded, from the loading reaction; the immune reaction cannot be explained by free flp22 binding to the FLS2 in the plasma membrane. There is no evidence that MEVs (or other EVs) spontaneously release their cargo in the extracellular or culture medium that might trigger a signaling pathway from the FLS2 in the plant's membrane. Thus, the observed data indicated that flp22-loaded MEVs are endocytosed by the epithelial plant cells, and that once inside the cells the endocytic vesicles carrying the loaded-MEVs find and fuse with endosomal vesicles that carry the FLS2 protein.

[0586] The flg22 peptide, is a 22-amino acid synthetic peptide, which mimics a conserved N-terminal region of bacterial flagellin. It has been shown that flp22 binds to plasma membrane FLS2 triggering a defense response of the cell against bacteria. However, it has never been shown in the prior art that free flp22 can be delivered directly to endosomal vesicles or that from there it can trigger the same biological response that it triggers from the cell surface. Effective delivery of the peptide inside the endosomal vesicles, mediated by peptide loaded-MEVs, allows such phenomenon to take place and to be observed.

[0587] Multiple clathrin-independent mechanisms of endocytosis have been described and characterized; some of which play a role in membrane bulk flow and cell membrane turnover. It is also known that FLS2 can be internalized into vesicles, not only upon ligand binding, but also in a ligand-independent manner for constitutive recycling (see, Beck et al., (2012) The Plant cell 24 (10): 4205-4219). FLS2 signaling also occurs from endosomes after internalization (see, Otegui et al. (2008) Traffic (Copenhagen, Denmark) 9 (10): 1589-1598). Plant endosomes are highly dynamic organelles; hence a rendezvous of ligand-carrying MEVs and receptor-carrying vesicles is possible inside the cell. This intracellular interaction results in fusion of MEVs and endosomes, providing ligand-mediated activation of FLS2 and production of the effector signaling. Similar mechanisms of endosome turnover are present in yeast and mammals, where endosomes are also known to recycle vacuolar cargo receptors back to the trans Golgi network and sort membrane proteins for degradation in the vacuole/lysosome.

[0588] These results indicate that when a MEV loaded with a ligand (agonist or antagonist) for either an internalized receptor, or for an endosomal intracellular receptor, such as the FLS2 receptor, the TLRs or alike, are internalized, as in the Examples, they may happen to reach and deliver their payload inside the vesicles where the target receptors are located and thus elicit a biological response from “within the cell”. Thus, MEVs can deliver agonists/antagonists or ligands to internalized or to intracellular receptors. No other alternative technologies have shown to be able of such an endeavor.

[0589] A significant relevance of the above observations comes from the fact that the plant FLS2 protein is a member of the large family of the so-called TLRs (or Toll-like Receptors), which play a pivotal role in innate immunity and in the modulation and triggering of immune responses in humans, mammals, and other animals.

[0590] There are similarities between how plants and animals perceive pathogens. Plants have highly sensitive perception systems that stimulate defense responses, and innate immunity in animals is based on the recognition of similar pathogen-associated molecular patterns. FLS2 in Arabidopsis, which is essential for flagellin perception, shares homology with the Toll-like receptor (TLR) family, which is a first line of defense against infectious diseases in animals (see, Gómez-Gómez et al. (2002) Trends in plant science 7 (6): 251-256).

[0591] TLR5 is responsible for flagellin perception in mammals, but other receptors from this family, including TLR3, TLR7, TLR8, TLR9, TLR13, (naturally located in cellular endocytic vesicles) also can be targets for intracellular MEV-mediated ligand delivery. This phenomenon paves the way for treatment of a number of therapeutic indications using specific ligand-loaded MEVs to trigger the immunomodulatory signaling pathways related to the different TLR family members, such as for infections (like sepsis and other), for inflammation (like rheumatoid arthritis and other), as vaccine adjuvants (including cancer vaccines) as well as for allergy treatment.

[0592] The following tables summarizes TLR members, their ligands and agonists/antagonists, and downstream effects:

| TLR | | |
|---|---|---|
| Member | Ligand(s)/Agonists | Actions/Downstream effects |
| TLR1 | Triacyl lipopeptides | Myeloid differentiation primary response |
| | (Pam3CSK4) | (MyD88)* and MAL/TIRAP** -dependent |
| | | activation of inflammatory cytokines, NF-KB and |
| | | AP-1; Induces phagocytosis of ligand, or bound |
| | | molecules |
| TLR2 | Zymosan, Porin, Modulin, | MyD88 and MAL/TIRAP-dependent activation of |
| | Lipoproteins, Lipotechoic acid, | inflammatory cytokines, NF-KB and AP-1; |
| | Diacyl lipopeptides, Atypical | Induces phagocytosis of ligand, or bound |
| | LPS, Peptidoglycan, Triacyl | molecules |
| | lipopeptides | |
| TLR3 | dsRNA | Trif dependent induction of Inflammatory |
| | | cytokines and Type I IFN; Initiates adaptive |
| | | immunity; Activates local cytokine burst and local |
| | | inflammatory response; Production of TNF-alpha, |
| | | IL-12, MCP1. |
| TLR4 | Mannans, Taxol, LPS | Trif and TRAM dependent induction of |
| | | inflammatory cytokines and Type -I IFN, TIRAP |
| | | and MyD88 induction of inflammatory cytokines; |
| | | Promotes addiction; Neuroinflammatory response |
| TLR5 | bacterial flagellin, profilin, | MyD88-dependent induction of NF-kB and |
| | HMGB1, Small molecule | inflammatory cytokines, activation of innate and |
| | agonists (CBLB502) | adaptive immunity |
| TLR6 | Zymosan, Porin, Modulin, | MyD88 and MAL/TIRAP-dependent activation of |
| | Lipoproteins, Lipoteichoic acid, | inflammatory cytokines, NF-KB and AP-1; |
| | Diacyl lipopeptides | Induces phagocytosis of ligand, or bound |
| | (Pam2CSK4), Atypical LPS, | molecules |
| | Peptidoglycan | |
| TLR7 | imidazoquinolinone, loxoribine, | MyD88 dependent induction of inflammatory |
| | ssRNA, bropirimine, resiquimod | cytokines and Type I IFN |
| TLR8 | ssRNA, small synthetic | MyD88 dependent induction of inflammatory |
| | compounds | cytokines and Type I IFN |
| TLR9 | CpG DNA | MyD88 dependent induction of inflammatory |
| | | cytokines and Type I IFN |
| TLR10 | Diacyl and Triacyl lipopeptides | TRIF-dependent activation of IFN-B; TRADD |
| | | dependent and/or MyD88 and TIRAP-dependent |
| | | activation of pro-inflammatory cytokines; |
| | | PI3K/Akt dependent activation of IL-1Ra; Direct |
| | | inhibition of MyD88 or MAPK--Anti- |
| | | inflammatory; |
| TLR11 | Profilin-like protein, non- | MyD88 dependent induction of inflammatory |
| | pathogenic bacteria | cytokines |

*TIR-containing adaptor protein (Tirap), also called MyD88 adaptor-like protein (MAL)
**toll/Interleukin-1 receptor domain containing adaptor protein

| TLR | | |
|---|---|---|
| Member | Ligand(s)/Antagonists | Action/Downstream Effects |
| TLR1 | Small molecule antagonists | Competitive inhibition of signaling cascade; |
| | (CU-T12-9, MMG-11) | Inhibition heterodimerization of TLR1/2; |
| | | Induce M1 macrophages to M2 phenotype; |
| | | Inhibition of immune response; |
| | | Inhibition of inflammatory response |
| TLR2 | Small Molecule | Competitive inhibition of signaling cascade; |
| | Antagonists(AT1-AT8, CU- | Inhibition of heterodimerization of TLR1/2; |
| | CPT22, CU-T12-9, MMG-11, | Induction of M1 macrophages to M2 phenotype; |
| | NPT1220-312), Phloretin, | Reduction of immune response; |
| | Sulfoglycolipids | Reduction of inflammatory Response; |
| | | Reduction of TNF-alpha production, reduced nitric |
| | | oxide (NO) formation; Reduced TLR2-induced |
| | | NF-KB transcriptional activity; |
| | | Reduction of NLRP3 including IL-1B, and 1L-18; |
| TLR3 | Small Molecule Antagonists | Decreased production of IL-6, IL-8, MIP1-alpha, |
| | (CU-CPT4a), Monoclonal | and TNF-alpha |
| | antibodies (CNTO4685, | |
| | CNTO5429) | |
| TLR4 | Small Molecule Antagonists | Decreased NF-kB activation and cytokine |
| | (Norbinaltorphimine, T4ICs, | production, reduction of nitric oxide (NO) |
| | T5342126, Simvastatin | formation; Decreased addiction; |
| TLR5 | Small Molecule Antagonist | Decreased NF-kB, AP-1 signaling and decreased |
| | (TH1020) | induction of proinflammatory cytokines; Altered |
| | | gut microbiome, tumor growth, metabolic |
| | | syndrome, liver fibrosis; |
| TLR6 | Simvastatin | Reduction in cytokine production; Prevention of |
| | | macrophage activation; |
| TLR7 | Chloroquine, | Reduction of IFN-1 and cytokine signaling, |
| | hydroxychloroquine, quinacrine | reduction of inflammation |
| TLR8 | Small Molecule Antagonist (CU- | Reduced induction of TNF, IL-6, and IL-10 |
| | CPT8m, CU-CPT9a) | |
| TLR9 | Small Molecule | Blocks release of inflammatory cytokines in |
| | Antagonists(NPT1220-312), | monocyte/macrophage cells; decreased |
| | chloroquine, | immunostimulatory response; |
| | hydroxychloroquine, quinacrine; | |
| | Suppressive or inhibitory | |
| | oligonucleotides | |
| TLR10 | — | — |

[0593] Thus, therapeutic targets for MEV-mediated delivery and expression, include receptors involved in diseases, disorders, or conditions, such that said receptors are cell surface receptors, or, most important, internalized receptors or internal (intracellular endosomal) receptors, like TLRs and others. MEVs may deliver agonists, antagonists, ligands, or other modulators of activity of such receptors. Targets of interest include, for example, modulation of toll-like receptors (TLRs). Such receptors are internalized into endosomal vesicles and can interact with ligands delivered by MEVs. This is exemplified in the Examples in which flagellin, surrogate thereof, and other known ligands for TLRs is delivered into cells via MEVs; activation of TLRs in turn activates inflammatory cytokines.

### J. EXAMPLES

[0594] The following examples are included for illustrative purposes only and are not intended to limit the scope of the invention(s).

### Example 1A

Production of Chlorella cells and isolation of Microalgae Extracellular Vesicles (MEVs)

### A. Batch Production of the Inoculum

[0595] Chlorella vulgaris of UTEX B 265 strain or UTEX 395 or UTEX 26, or UTEX 30 or UTEX 259 or UTEX 2219 or UTEX 2714 or UTEX B 1811 (available from the UTEX Culture Collection) or the strain designated CCAP 211/19, GEPEA, University of Nantes, France, or any other suitable strain. The selected strain is genetically modified to encode and/or express a heterologous product, such as, but not limited to, one or more of RNA (coding or non-coding), small peptides, peptides, polypeptides and protein, complexes, such as editing complexes). The strains are used to produce the algal cell material. Chlorella is stored on nutrient agar slopes until flask/photobioreactor (PBR) inoculation. For different experiments, different scales of production, between 400 mL (flasks) to 170 L (several PBRs with different total volume) cultures, are used. This description relates to the highest volume of PBR used (170 L, HECTOR PBR [“Hector” photobioreactor designed by the Laboratory of Process Engineering-Environment-Agri-food (GEPEA)/CNRS for the culture of microalgae. Reference: 20160067_0017. Year of production: 2016. Maximum size: 56.43×37.66 cm/170 L/300 dpi]).

[0596] A 5-Liter PBR is filled with 4 L of sterile BG-11 medium (see, e.g., utex.org/products/bg-11-medium for a description of its preparation and see table below (Table 1) for autotrophic growth), and inoculated directly from the stock algal slope on nutrient agar. Then, the Chlorella strain is grown as a batch culture in a bubble column using the following culture parameters: temperature of 23° C.; medium pH 7.5-8.0; light intensity: 100 μmol·m⁻²·s⁻¹; light cycle: continuous. Biomass concentration, specific growth rate and biomass productivity of Chlorella are estimated daily. Typically, after 6 days of continuous growth the cultures reached biomass concentrations of approx. 1.2 g/L. The total crop volume of 20 L is collected for subsequent production scale-up to the HECTOR PBR.

TABLE 1
Composition of the BG-11 medium

| | Conc | MI |
|---|---|---|
| Salt Mix | 100x | 10 |
| Iron* | 1000x | 1 |
| Nitrate* | 100x | 10 |
| Trace metals | 1000x | 1 |
| agar | | 14 |
| H₂O | | up to 1 L |
| pH 7 | | |

*In case of precipitation, add after sterilization.

Stock solutions for BG-11 medium:

| | g/L | MW | μM |
|---|---|---|---|
| Nitrate 100x | | | |
| NaNO₃ | 150 | 85 | 1764.71 |
| Iron 1000x | | | |
| Fe-EDTA | 3 | 344.06 | 8.72 |
| Salt Mix 100x | | | |
| K₂PO₄ | 4 | 173.17 | 23.10 |
| MgSO₄•7H₂O | 7.5 | 246.48 | 30.43 |
| CaCl₂•2H₂O | 3.6 | 147.01 | 24.49 |
| Na₂CO₃ | 2 | 105.99 | 18.87 |

add HCl if needed

| | | | |
|---|---|---|---|
| Trace Metals 1000x | | | |
| H₃BO₃ | 2.9 | 61.84 | 46.25 |
| MnCl₂•4H₂O | 1.8 | 197.91 | 9.15 |
| ZnSO₄•7H₂O | 0.2 | 287.56 | 0.77 |
| Na₂MoO₄•2H₂O | 0.4 | 241.95 | 1.61 |
| CuSO₄•5H₂O | 0.1 | 249.68 | 0.32 |
| CoCl₂•6H₂O | 0.3 | 237.93 | 0.14 |

### B. Production Scale-Up in a Semi-Industrial Photobioreactor (PBR)

[0597] The Chlorella cells are cultured further in a 170-Liter photobioreactor system (HECTOR). The inoculum is added to sterile BG-11 medium (see Table 1) to the total volume of 150 L and the cells are grown autotrophically as a semi-batch culture with bubble column mixing. The following culture parameters are used: temperature of 18±4° C.; medium pH 8.0±0.05; light intensity: 150-300 μmol·m⁻²·s⁻¹; between 150 μmol·m⁻²·s⁻¹ the three first days of each batch, 250 μmol·m⁻²·s⁻¹ days four and five and 300 μmol·m⁻²·s⁻¹ days six and seven before the harvesting as light cycle: continuous, with gradual increase in light intensity (FIG. 1A). Biomass concentration, growth rate and biomass productivity of Chlorella are estimated daily. On the 6th day of the cultivation, at the biomass concentration of approx. 1.5 g/L Chlorella production harvesting is performed. FIG. 1A shows a profile of light intensity used in HECTOR PBR cultures.

### C. Production of 3 Consecutive Batches of Chlorella

[0598] The Chlorella production is performed in 3 semi-batches of 130 L, from which about 80% of the culture volume was aseptically removed for downstream treatment and supplemented with sterile BG-11 medium. Following the harvest, the light intensity is lowered to 150 μmol·m⁻²·s⁻¹ to avoid excessive photon intake. A seeding line is set up to go from 100 mL of culture to 150 L of culture. Three consecutive batches lasting 6-7 days are carried out with the aim of extracting a vesicle concentrate devoid of microalgae.

### Culture Parameters Monitoring

### 1. Determination of the Protein Content

[0599] The protein content of cultures is determined by elemental analysis, resorting to Vario EL III (Vario EL, Elementar Analyser systeme, GmbH, Hanau, Germany), according to the procedure provided by the manufacturer. The final protein content is calculated by multiplying the percentage of nitrogen given by the elemental analysis by 6.25.

### 2. Estimation of Chlorophyll Content

[0600] Culture samples are centrifuged at 2547 g for 15 min using a Hermle centrifuge (HERMLE Labortechnik GmbH, Wehingen, Germany). Pigments are extracted from the resulting pellet by bead milling in acetone. The full absorbance spectrum of the extract is obtained with a Genesys™ 10S UV-VIS spectrophotometer (Thermo Scientific, Massachusetts, USA) and iteratively decomposed to the standard pigment spectra to obtain the total chlorophyll content.

### 3. Growth Estimation

[0601] Dry weight is obtained by filtration of culture samples using pre-weighed 0.7 μm GF/C 698 filters (VWR, Pennsylvania, USA) and dried at 120° C. until constant mass is obtained using a DBS 60-30 electronic moisture analyzer (KERN & SOHN GmbH, Balingen, Germany). All dry weight samples are washed with demineralized water to remove growth medium salts.

### D. Isolation of Microalgae Extracellular Vesicles: Production of Concentrated MEV Preparation (Down-Stream Processing: Clarification and Concentration Step)

[0602] The culture harvested from the photobioreactor is centrifuged at 2,700 g for 5 minutes at room temperature for cell removal. The supernatant is transferred into fresh bottles and centrifuged again at 2,700 g for 5 minutes at room temperature. The clear MEV-containing solution is then subjected to membrane filtering using a 1.2 μm cut-off cartridge filter. The filtrate is concentrated with the use of a 100 kDa MWCO tangential filtration system. At each isolation step the material is analyzed spectrophotometrically for chlorophyll and particulate matter. Dry weight of the final product is <0.01 g/L and the concentration factor relative to the initial volume of the processed culture is approx. 20. Thus, obtained MEV solution is stored at −50° C. in 1 L pockets for further purification.

### E. Detailed Protocol for Purification of Chlorella Microalgae Extracellular Vesicles

[0603] The MEV preparation, clarified and concentrated and stored (1.0-1.2 L) as described in section D, is thawed in a cold room at 4° C. overnight. When the preparation is thawed, harvest the biomass by centrifugation (set the temperature to 4° C.): 2×10000 g for 10′ at 4° C. The MEV supernatant is collected and filtered by vacuum filter onto 0.65 μm filters to get rid of the remaining cells. The MEVs are concentrated and purified by tangential flow filtration (TFF) using Sartorius VivaFlow® systems. The membrane is washed by running water at ˜100 ml/minute, as described by the manufacturer. After that, the circuit is washed with cell-free medium (BG-11 medium) at ˜200 ml/minute (pressure reading at 2/2,5 bars).

[0604] The MEV preparation (supernatant) is run in the circuit at ˜200 ml/minute (pressure reading at 2/2,5 bars). When the residual volume in the circuit plus the reservoir is about 200 mL, the TFF is used to diafiltrate and change the medium from BG-11 to PBS using 1 L of PBS. When the residual volume is about 200 mL in PBS medium the flow is slowed down to ˜100 ml/minute (20 minutes, 1 bar). After TFF MEV are recovered in a volume of 30 to 60 mL.

[0605] MEVs are then filtered using 0.45 μm filters and purified by ultracentrifugation. The filtered MEVs are loaded on the ultracentrifuge tubes and centrifuged for 1 h at 4° C., at 100000 g (27400 rpm) (acceleration and deceleration at max), for example in a SorVall® WX ultra 80 TST 28.38. Pellets containing the MEVs are resuspended in 1-2 ml of PBS buffer and sterilized by filtration using a 0.2 μm filter and analyzed by nanoparticle tracking analysis (NTA; dilute up to 1:1000 before the NTA analysis).

### F. Protocol for Purification of Chlorella Microalgae Extracellular Vesicles by Size Exclusion Chromatography (SEC)

[0606] When higher purity of preparations is needed, a last step of purification is added. The MEVs previously concentrated by TFF and purified by ultracentrifugation and formulated in PBS at concentration of 10Exp11 to 10Exp13 per mL are seeded in a pre-packed column qEV1 (IZON, Lyon France). The MEVs are eluted using PBS solution. The elution fractions of 0.5 mL are collected. MEVs are recovered in the first fractions as shown in FIG. 1B. MEV concentrations in the initial sample and in the fractions collected throughout the elution were evaluated with the Zeta View®(Nanoparticle Tracking Analyzer from Particle Metrix) as the quantity of proteins by Bradford assay. The most concentrated fractions (4-5) were pooled and stored at 4° C. before use.

### Example 1B

Small scale production of Chlorella vulgaris for (1) screening and selection of producer cell lines and (2) MEVs endo-loading

### A. Conservation of Chlorella Producer Cell Lines

[0607] After the screening of cell clones, the positive clones (cell lines) are resuspended and grown, repeating the process every 3-4 days in order to maintain the clones in an exponential phase of growth. The conditions of growing are the following: BG-11 medium with a light/night periodicity of 12 h/12 h at 20° C.-25° C. and maximum of light intensity of 3200 lux. The clones are also maintained in BG-11 agar plate and are frozen using the method describe above.

### B. Amplification of Chlorella Producer Cell Lines

[0608] Amplification phase (three weeks): For the first amplification from 96 wells plate to T25 flasks, 50 μL of cell culture are added to 5 mL of BG-11 medium and cultured for one week in the conditions described above. The second amplification round is performed by taking 4 mL from the T25 cell culture and diluted in 26 mL of BG-11 medium in a T75 flask. Then, the producer cell lines are cultured for one week. The last amplification before characterization is performed by taking 15 mL from the second amplification (T75 flasks) and diluting it with 75 mL of fresh BG-11 medium in a T225 flask, for 1 week. The end of that week is the end of the amplification phase.

[0609] Harvesting phase (three weeks): Starting from the end of the amplification phase, every 7 days, 50 mL of culture are harvested for semi-purification and testing (see below), and 50 mL of fresh BG-11 medium are added, during the 3 weeks. The samples taken every 7 days are semi-purified to isolate the extracellular vesicles (MEVs) and then MEVs are tested for protein content (GFP or Luciferase) or mRNA content (GFP or Luciferase).

[0610] During the amplification phase, Chlorella cells are exposed to antibiotics (Hygromycin or Kanamycin) to select for transformed clones. The antibiotics are absent during the harvesting phase.

### C. Semi-Purification of Endo-Loaded MEVs from Small Scale Production of Chlorella Producer Cell Lines

[0611] To isolate the MEVs in the samples, the harvested culture medium (cells+MEVs) is treated as follows. The cell-free medium is obtained through a series of low-speed centrifugations: first at 300 g, second at 1000 g, third at 3000 g, and finally at 10000 g. Then, the medium is filtered under vacuum with 0.65 μm filters. After that, a Tangential Flow Filtration is performed for each sample using VivaFlow 50R-300K system (Sartorius®) to concentrate the MEVs. Samples are further filtered on 0.45 μm filters. The concentration and size distribution of semi-purified MEVs then is analyzed by Nanoparticle Tracking Analysis (NTA; ZetaView® (Nanoparticle Tracking Analyzer from Particle Metrix) as described in Example 2 and 4.

### Example 2

MEV characterization

### A. Nanoparticle Tracking Analysis (NTA)

[0612] MEVs are analyzed for size and dispersity (size distribution) using a Zetaview® Classic Z laser 488 nm (PARTICLEMETRIX). The instrument is equipped with a 488 nm laser, a high sensitivity sCMOS camera and a syringe pump. The MEV samples are diluted in particle-free PBS (0.22 μm filter) to obtain a concentration within the recommended measurement range (1-10×10⁸ particles/mL), corresponding to dilutions of from 1/1000 to 1/10000 depending on the initial sample concentration.

[0613] For each sample, 5 experiment videos of 60 seconds duration are analyzed using NTA 3.4 Build 3.4.003 (camera level 15-16) with syringe pump speed 30. A total of 1500 frames are routinely examined per sample, captured, and analyzed by applying instrument-optimized settings using a suitable detection threshold so that the observed particles are marked with a red cross and that no more than 5 blue crosses are seen. Further settings are set to “automatic” and viscosity to “water”.

### B. Transmission Electron Microscopy (TEM)

[0614] To verify the presence and morphology of intact MEVs, the preparations are analyzed using transmission electron microscopy (TEM). MEV samples are allowed to attach to Formvar/carbon-coated grids for 15-20 min. The excess of sample is removed and the grides, fixed with 2% formaldehyde, 1% glutaraldehyde in PBS (0.1M, pH 7.4) for 20 min at room temperature. After that, washed again with PBS followed by distilled water and finally stained with 0.4% uranyl acetate/1.8% methyl cellulose for 10 min, and then dried. The preparations are observed using a Tecnai Spirit electron microscope (Thermo Fisher) equipped with a 4k CCD camera.

### C. DiR Fluorescent Labelling

[0615] For further characterization studies, MEVs are labelled with DiR, a lipophilic carbocyanine derivative (1,1′-Dioctadecyl-3,3,3′,3′-Tetramethylindotricarbocyanine Iodide; ThermoFisher Scientific) that has low fluorescence in water, but becomes highly fluorescent upon membrane incorporation, and diffuses laterally within the plasma membrane. Fresh samples of MEVs (prepared as above) are re-suspended in 1 ml of BG-11 culture medium. 5 μl of 1 mg/ml DiR solution are added to the samples, following incubation at 37° C. for 1 hour. Samples are then ultra-centrifuged at 100,000 g for 30 min using a Kontron TST 55.5 rotor at 28,100 rpm. The supernatant is removed, while the pellets are washed twice with 1 ml of PBS and centrifugation at 100,000 g for 30 min. Finally, the pellet is re-suspended in 1 ml of PBS. The DiR-labelled MEVs are stored at 4° C. and used promptly to ensure the highest possible fluorescent intensity. DiR fluorescence of the labelled MEVs is measured using a SpectraMax® fluorescence microplate reader (Molecular Devices, USA) with excitation at 750 nm and emission at 780 nm.

### D. PKH26 Fluorescent Labelling

[0616] For uptake and internalization studies, MEVs are labelled with PKH26 (Sigma-Aldrich), a fluorochrome in the red spectrum with peak excitation (551 nm) and emission (567 nm) that may also be excited by a 488 nm laser. Fresh samples of MEV (prepared as above) are re-suspended in 1 ml of Diluent C from the PKH26 kit. 6 μl of PKH26 dye is added to the samples, followed by continuous mixing for 30 seconds by gentle pipetting. After 5-minute incubation at room temperature, the samples are quenched by adding 2 ml of 10% BSA in 1×PBS. The volume is brought up to 8.5 ml in media and 1.5 ml of 0.971 M sucrose solution is added by pipetting slowly and carefully into the bottom of the tube, making sure not to create turbulence. The PKH26-labelled MEVs remains on top of a sucrose cushion. Then, the samples are ultra-centrifuged at 100,000 g for 2 hours at 2-8° C. using a Kontron TST 55.5 rotor. The supernatant is removed, while the pellets are washed with 1×PBS by gentle pipetting and centrifuged again at 100,000 g for 30 min. Finally, the pellet is re-suspended in 1 ml of 1×PBS. The PKH26-labelled MEVs are stored at 4° C. and filtered with 0.22 μm filter before adding to cells.

### E. Flow Cytometry Experiments

[0617] The analyses are conducted using LSRII flow cytometer with CellQuest® Pro software (BD Biosciences). Latex beads (Biocitex-Megamix-Plus SSC) of 0.1 and 0.9 μm diameters and fluorescent at 488 nm wavelength, are prepared and used according to the manufacturer's recommendation to define the MEV gate. Since latex beads typically have higher refractive index and thus lower limits of size detection by flow cytometry than MEVs, the thresholds for forward and side scatter are adjusted to avoid background noise during acquisition. A predefined MEV gate is applied to all samples during analysis.

### Example 3

Chlorella vulgaris engineering to generate producer cell lines carrying exogenous coding regions and endogenous loading of biomolecule cargo into the Microalgae Extracellular Vesicles (MEVs)

### A. Transformation Using a Ti Plasmid, and Agrobacterium tumefaciens to Generate Stable Chlorella Producer Cell Lines for Endogenous Loading of Biomolecules, Such as Proteins, Peptides, siRNA, mRNA, Complexes) into the MEVs

### 1. Chlorella Culture Conditions

[0618] Chlorella cells (Chlorella vulgaris UTEX 265, UTEX 395, and CCAP 211/19 from GEPEA, University of Nantes, France) are maintained in BG-11, 1% agar plates and grown in BG-11 liquid medium pH 7, in autotrophic conditions in growth chamber under the following conditions: i) temperature: 25° C.; ii) photoperiod: 14 h/10 h; iii) light intensity: 100 μmol·m⁻²·s⁻¹

Agrobacterium strain and vectors

[0619] The plasmid vectors used for Agrobacterium transformation are generated using the green gate assembly strategy (see, Lamproulos et al. (2013) J. PLOS One 8: e83043; PMID24376629). The gene specific or chimeric constructs are cloned in modules “B” or “D” and/or “B and D” according to the cloning strategy (coding or non-coding RNA) and assembled in expression plasmid constructs under the control of Cauliflower Mosaic Virus (CaMV) 35S promoter or other promoters known to those of skill in the art for expression in microalgae, including any described herein, such as those listed in the table in the detailed description, and a specific construct encoding a product of interest, and a resistance cassette (Hygromycin resistance gene) or NPTII gene (neomycin phosphotransferase II). All chimeric constructs are obtained by simultaneous ligations of the different fragments into the “B” or “D” or/and “B and D” module. All plasmids are verified by restriction analysis, and Sanger sequencing.

[0620] The binary vector pCAMBIA1304 (cambia.org) encoding a gfp: gusA fusion reporter and a selectable marker for hygromycin B resistance driven by the CaMV 35S promoter is used for some transformations.

[0621] The Agrobacterium tumefaciens used for Chlorella transformations is a disarmed strain C58C1. Plasmids are introduced into A. tumefaciens by electroporation.

### 2. Transformation of Chlorella Cells with Agrobacterium tumefaciens

[0622] Chlorella cells (10⁸ cells) from an exponentially growing culture are plated on BG-11 agar plates and kept under normal light for 5 days. For genetic transformation, A. tumefaciens carrying the appropriate plasmid vector is pre-inoculated the day before the transformation. The day of the transformation 5 mL of A. tumefaciens pre-inoculum is seeded in 50 mL LB medium and grown up to OD600=around 1. At the defined optical density A. tumefaciens pre-inoculum is washed and resuspended in 200 μL induction medium (BG-11 medium at pH 5.6 plus acetosyringone 100 μM). Chlorella cells are gently harvested from the plates and resuspended in the 200 μL of induction medium plus the A. tumefaciens and co-cultivated for 2 days in induction medium in dark. After the co-cultivation, the cells are harvested and put in BG-11 medium pH 7 supplemented with cefotaxime and kept in dark for 2 days at 25° C. Finally, cells are harvested and plated onto BG-11 agar plates supplemented with the relevant antibiotic according to the plasmid vector used for the transformation. Plates are kept in dark for 2 more days and then exposed to light. Around 2-3 weeks later, colonies are replicated on fresh BG-11 agar plate containing relevant antibiotics. Resistant colonies are propagated on non-selective media and used for PCR analysis. Detection of contaminating Agrobacterium is performed by growing cells on LB agar plates for at least 7 days at 25° C. in the dark. The expression of the gusA reporter gene is confirmed by GUS histochemical assay, while visualization of gfp expression is performed using a fluorescent microscope (Leica DM Ire2, Wetzlar, Germany).

### B. Transformation of Chlorella Cells by Electroporation to Generate Stable Producer Cell Lines that Endogenously Load Biomolecules (e.g., Proteins, Peptides, RNAi, mRNA, Complexes) into the MEVs; Gfp or RNAi Against Luciferase Coding Regions are Exemplary Biomolecules

### a. Chlorella Culture Conditions

[0623] Chlorella cells (Chlorella vulgaris UTEX 265, UTEX 395 and CCAP 211/19 from GEPEA, University of Nantes, France) are maintained in BG-11, 1% agar plates and grown in BG-11 liquid medium pH 7, in autotrophic conditions in growth chamber under the following conditions: i) temperature: 25° C.; ii) photoperiod: 14 h/10 h; iii) light intensity: 100 μmol·m⁻²·s⁻¹.

### b. Enzyme Digestion for Chlorella Cells to Prepare Protoplasts

[0624] To prepare protoplasts, Chlorella cells are treated with an enzyme mixture containing 0.6 M sorbitol, 0.1% MES, 50 mM CaCl₂)₂H₂O, 1.0 mg/mL lysozyme, 0.25 mg/mL chitinase, and 1.0 mg/mL sulfatase in 10 mL of sterile water. A total of 1×10⁷ cells 100 μL at early exponential growth phase are used for preparing protoplasts in 10 mL of the mixture solution. Cells are incubated at room temperature in the dark up to 24 h with gentle rotation at 25 rpm. Cells are harvested by centrifugation at 1350×g for 10 min. The viability of protoplasts after enzymatic treatment is about 7%.

### c. Electroporation Conditions

[0625] Chlorella cells and Chlorella protoplasts, at a concentration of 10⁶ in 100 μL, are transformed at different conditions between 600V to 1500V pulse voltage with 3 to 5 ms pulse width and using 60 ng plasmid using a Bio-Rad Gene Pulser X cell electroporation system. Electroporation is slightly modified from previously described methods (Bai et al. (2013) PLOS one 8: e54966, doi: 10.1371/journal.pone.0054966; Run et al. (2016) Algal Res 17:196-201, doi: 10.10.106/j.algal 2016.05.002; and Kumar et al. (2018) Journal of Applied Phycology 30:1735-1745, doi.org/10.1007/s10811-018-1396-3) as follows: 45 μL of pre-cooled osmotic buffer (0.2 M mannitol and 0.2 M sorbitol) is added for the suspension of the harvested cells (1350×g for 10 min) and then incubated for 40 min on ice. Again, 45 μL of pre-cooled electroporation buffer (0.2 M mannitol, 0.2 M sorbitol, 0.08 M KCl, 0.005 M CaCl₂, and 0.01 M HEPES; pH 7.2) is added in the suspension solution. 60 ng of plasmids of pCAMBIA1302 or pIT69 (in 10 μL) is added to the suspension cells immediately along with 1.5 μg of sonicated salmon sperm DNA.

### d. Screening and Clone Selection

[0626] After electroporation, cells are kept on ice for 60 min, transferred to a 12-well plate containing 1.5 mL of BG-11 medium, and cultured in the dark at 25° C. for 24 h. The cultured cells are harvested by centrifugation, suspended in 200 μL of BG-11 medium, plated onto BG-11 agar plates containing 20 μg/mL hygromycin, and incubated in continuous fluorescent light with 60 μmol photons m⁻¹ s⁻¹ at 25° C.

[0627] Two weeks after transformation and plating, clones are picked and cultured in 96-well plate for 1 week with BG-11 medium and cultured in the dark at 25° C. and 20 μg/mL hygromycin. Chlorella cells are then divided into two groups: 1) for PCR analysis and 2) to test ability to in growing concentrations of hygromycin between 0 and 100 μg/mL.

[0628] Hygromycin resistance test of selected clones indicates that clones are obtained after transformation of Chlorella cells under all of the electroporation conditions tested (see the Tables A and B below, where+indicates clone viability for the hygromycin concentration tested after 11 days of incubation).

[0629] Strains and clones description: 265 (A1) is Chlorella vulgaris UTEX 265 strain, Ath1 to Ath7 are transformed clones obtained from Chlorella vulgaris UTEX 265 strain by electroporation, 395 (K1) is Chlorella vulgaris UTEX 395 strain, Kth1 and Kth2 are transformed clones obtained from Chlorella vulgaris UTEX 395 strain by electroporation and Hr5 is a clone transformed from Chlorella vulgaris UTEX 265 strain obtained by Agrobacterium tumefaciens.

TABLE A

| | | | | | | | |
|---|---|---|---|---|---|---|---|
| Conc. | Clone | 265(A1) | Ath1 | Ath2 | Ath3 | Ath4 | Ath5 |

| | | | | | | |
|---|---|---|---|---|---|---|
| 0 μg/mL | + | + | + | + | + | + |
| 5 μg/mL | + | + | + | + | + | + |
| 10 μg/mL | + | + | + | + | + | + |
| 20 μg/mL | | + | + | + | + | + |
| 30 μg/mL | | + | + | + | + | + |
| 50 μg/mL | | + | + | + | + | + |
| 70 μg/mL | | | | | | + |
| 100 μg/mL | | | | | | |

TABLE B

| | | | | | | | |
|---|---|---|---|---|---|---|---|
| Conc. | Clone | Ath6 | Ath7 | 395(K1) | Kth1 | Kth2 | Hr5 |

| | | | | | | |
|---|---|---|---|---|---|---|
| 0 μg/mL | + | + | + | + | + | + |
| 5 μg/mL | + | + | + | + | + | + |
| 10 μg/mL | + | + | + | + | + | + |
| 20 μg/mL | + | + | + | + | + | + |
| 30 μg/mL | + | + | | + | + | + |
| 50 μg/mL | + | | | + | + | + |
| 70 μg/mL | | | | + | + | + |
| 100 μg/mL | | | | +/− | | + |

[0630] PCR analysis, of each of 20 clones obtained by electroporation from Chlorella vulgaris UTEX 265 strain, and 10 clones obtained by electroporation from Chlorella vulgaris UTEX 395 strain were tested and confirmed the integration of hygromycin phosphotransferase gene (hpt) at the molecular level. The efficiency of transformation by electroporation of both strains of Chlorella vulgaris tested was between 30-50%.

### C. Particle Gun Transformation to Generate Stable Producer Cell Lines for Endogenous Loading of Biomolecules (e.g., Proteins, Peptides, RNAi, mRNA, Complexes) into the MEVs Using Gfp or RNAi Against Luciferase Coding Regions as Exemplary Biomolecules

### 1. Transformation of Chlorella vulgaris Cells Using Gun Microparticles Method

[0631] Chlorella vulgaris cells (1×10⁸) are collected from exponentially growing liquid cultures in BG-11 medium and spread on 10 cm 1% BG-11 agar plates. Two hours later, transformations are carried out using the microparticle bombardment method (Biolistic PDS-1000/Particle Delivery System (BioRad)) adapted from Daboussi et al. (2014, Genome engineering empowers the diatom Phaeodactylum tricornutum for biotechnology. Nature Communications 5:3831) with minor modifications. In brief, gold particles (particle diameter of 0.6 μm, BioRad) are coated with DNA using 1.25 M CaCl₂) and 20 mM spermidine. Agar plates Chlorella cells to be transformed are positioned at 7.5 cm from the stopping screen within the bombardment chamber. A burst pressure of 1,550 psi and a vacuum of 25 Hg are used. For the experiments, 5 μg of each plasmid encoding hygromycin resistance gene (pIT69) or not (p16604) are used as negative control. Five bombardments are performed using each DNA.

### 2. Cloning and Selection of Transformed Clones

[0632] Two days post-transformation, bombarded cells are spread with 50 μg/ml or 100 μg/ml of hygromycin on the agar plates and placed in the incubator under a 12 h light: 12 h dark cycle for at least 3 weeks. Chlorella colonies appear about 2 weeks after transformation by bombardment. After 2 weeks, colonies are visible on the plate with cells that contain and express the hygromycin resistance gene, and not visible on the plates containing the negative control. Colonies are observed on plates on which the cells that express the hygromycin resistance gene (pIT69) are cultured. Negative control (p16604) clones do not grow in the presence of hygromycin.

[0633] For subcloning, colonies from transformations are re-suspended in BG-11 culture medium and plated at a low density (600 cells on a 10 cm agar plate containing hygromycin antibiotic), providing for the isolation of subclones 2-3 weeks later.

### 3. Chlorella Genomic DNA Extraction

[0634] Genomic DNA is extracted from exponentially growing cultures using a NucleoSpin DNA protocol. Genomic DNA (gDNA) concentration is measured using a QuBit® fluorometer.

### 4. PCR Analysis of Transformants

[0635] Direct PCR colony analysis on gDNA is performed by collecting a little bit of the colony to be analyzed (use a pipette tip or an inoculation tool or a toothpick) and resuspending it in 20 μl of HS5 buffer (125 mM NaOH, 1 mM EDTA, 0.1% Tween 20). After 20 s of vortexing at max speed, the samples are incubated for 10-15 minutes at RT and boiled at 95° C. for 10-15 s. Next, 100 μl of H₂O is added, mixed well and briefly centrifuged to spin down the debris. 1-5 μl of supernatant are used as a template for PCR reaction. The plasmid used for the transformation is the positive control; wild type gDNA served as the negative control.

[0636] PCR analysis is performed in a 25 μL reaction containing 150 ng DNA, 1.25 mM dNTP, 2 mM MgCl₂, 1.25 μM of each primer and 1 U OneTaq DNA polymerase. The primers used to amplify a 650 bp fragment of the hygromycin resistance gene are Hygro 1: 5′-AGCGTCTCCGACCTGATG-3′ (SEQ ID NO:66) and Hygro 2: 5′-CGACGGACGACTGACGG-3′; (SEQ ID NO:67). Amplification is carried out in a thermal cycler (Eppendorf). The amplification of hygromycin resistance gene shows the expected 650 bp fragment in all positive clones (i.e., growing in BG-11 plus 50 mg/mL hygromycin).

### D. Transformation by Multisequence Pulses Electroporation to Generate Stable Producer Cell Lines that Endogenously Load Biomolecules (e.g., Proteins, Peptides, RNAi, mRNA, Complexes) into the MEVs; eGFP (Modified Codon or not) or fLUC (Modified Codon or not) or RNAi Against Luciferase Coding Regions are Exemplary Biomolecules

[0637] A highly efficient multisequence pulses method was optimized to transform Chlorella vulgaris cells; with the objective of generating stable producer cell lines and to obtain MEVs endo-loaded (with tailored mRNA, proteins, or siRNAs) by the microalgae. The multisequence pulses method generates, first, pores in the wall and membranes and, second, pulses the offered DNA into the cells.

### 1. Generation of Plasmid Vectors

[0638] For the generation of Chlorella vulgaris producer cell lines a series of 57 plasmid constructs (Table 3 listing plasmids and components thereof; see, also, SEQ Nos.: 238-294) were obtained using the Green-Gate system combining: 12 different promoters-enhancers, and 2 marker proteins eGFP and firefly luciferase, the cDNA encoding each of the two proteins was cloned in plasmid vectors using mammalian codons or Chlorella codons (different GC %), and 2 antibiotic resistance genes in order to obtain Chlorella producer cell lines and RNAi against firefly luciferase (fLUC). The constructs are verified by sequencing the complete region of interest, from the promoter of the transgene to the poly-A of the antibiotic resistance gene. Sequencing of all cloned fragments is performed using the primers set forth in Table 2.

TABLE 2
List of primers used to verify plasmid sequences

| | | | SEQ ID |
|---|---|---|---|
| Primer Name# | Primer Sequence | target | NO. |
| BSAICMVF1 | AAAAGGTCTCAACCTGTGATGCG | CMV promoter | 207 |
| | GTTTTGGCAGTA | | |
| BSAICMVR1 | AAAAGGTCTCATGTTAGCTCTGC | CMV promoter | 208 |
| | TTATATAGACCTCCCAC | | |
| BSAICMV + ENHF1 | AAAAGGTCTCAACCTCGTTACAT | CMV promoter + | 209 |
| | AACTTACGGTAAATGGC | enhancer | |
| BSAICMV + ENHR1 | AAAAGGTCTCATGTTAGCTCTGC | CMV promoter + | 210 |
| | TTATATAGACCTCCCAC | enhancer | |
| BSAISV40F1 | AAAAGGTCTCAACCTCTGAGGCG | SV40 promoter | 211 |
| | GAAAGAACCAGC | | |
| BSAISV40R1 | AAAAGGTCTCATGTTTTTGCAAA | SV40 promoter | 212 |
| | AGCCTAGGCCTCCA | | |
| BSAISV40 + AMPRF1 | AAAGGTCTCAACCTCGCGGAACC | SV40 promoter + | 213 |
| | CCTATTTGTTTATTTTTC | enhancer | |
| BSAISV40 + AMPRR1 | AAAAGGTCTCATGTTTTTGCAAA | SV40 promoter + | 214 |
| | AGCCTAGGCCTCCAAAAAAGCC | enhancer | |
| PGGA-L2151 | TTTATGCTTCCGGCTCGTAT | Other promoters used | 215 |
| PGGA-R3394-2327 | AGGGTTTTCCCAGTCACGA | Other promoters used | 216 |
| BSAIEGFPF1 | AAAAGGTCTCaGGCTATGGTGAG | CDS eGFP | 217 |
| | CAAGGGCGAGGA | | |
| BSAIEGFPR1 | AAAAGGTCTCaCTGACTTGTACA | CDS eGFP | 218 |
| | GCTCGTCCATGCC | | |
| KANR3 | GGCCATTTTCCACCATGATA | ALL antibiotic | 219 |
| | | resistance genes | |
| PGGA-L2151 | TTTATGCTTCCGGCTCGTAT | ALL antibiotic | 220 |
| | | resistance genes | |
| PGGA-R3394-2327 | AGGGTTTTCCCAGTCACGA | ALL antibiotic | 221 |
| | | resistance genes | |
| DTR-64 | CGATTTTTGTGATGCTCGTC | ALL insert CDS 5′ | 222 |
| | | region and 3′ region | |
| DTR-63COR | ACCTCTCGGGCTTCTGGAT | ALL insert CDS 5′ | 223 |
| | | region and 3′ region | |
| fLUCR1 | AGCACGGGCATGAAGAAC | CDS fLuc | 224 |
| fLUCR2 | AAGCGGTACATCAGCACCA | CDS fLuc | 225 |
| fLUCR3 | CGTCCCAGTAGGCGATGT | CDS fLuc | 226 |
| E001R1 | TTGAGAATGAACAAAAGGACCA | CDS fLuc | 227 |
| F005R1 | TGATATCTAACGATCAAACCCAGA | CDS fLuc | 228 |
| F005R3 | AGCAATCGCGCATATGAAA | CDS fLuc | 229 |
| F005R5 | TTTTAGGTTTGACCGGTTCTG | CDS fLuc | 230 |
| A432F1 | ACACCTACCGATGCGTGAA | CDS fLuc | 231 |
| E001R1 | TTGAGAATGAACAAAAGGACCA | CDS eGFP in | 232 |
| | | kanamycin resistance | |
| | | vectors | |
| KanR1 | GCCCAGTCATAGCCGAATAG | CDS eGFP in | 233 |
| | | kanamycin resistance | |
| | | vectors | |
| KanR3 | GGCCATTTTCCACCATGATA | CDS eGFP in | 234 |
| | | kanamycin resistance | |
| | | vectors | |
| A432F1 | ACACCTACCGATGCGTGAA | CDS eGFP in | 235 |
| | | kanamycin resistance | |
| | | vectors | |
| eGFPR1 | CTGGGTGCTCAGGTAGTGGT | CDS eGFP in | 236 |
| | | kanamycin resistance | |
| | | vectors | |
| eGFPR2 | TCGTCCTTGAAGAAGATGGT | CDS eGFP in | 237 |
| | | kanamycin resistance | |
| | | vectors | |
| A601F1 | GCGTGGATAGCGGTTTGA | CMV promoter | 367 |
| A601R1 | GGCGGAGTTGTTACGACATT | CMV promoter | 368 |
| A601F2 | ATGCGGTTTTGGCAGTACA | CMV promoter | 369 |
| A601R2 | CTTATAATAGACCTCCCACCGTA | CMV promoter | 370 |
| | CAC | | |
| A602F1 | TACCATGGTGATGCGGTTT | CMV promoter + | 371 |
| | | enhancer | |
| A602R1 | AAGTCCCGTTGATTTTGGTG | CMV promoter + | 372 |
| | | enhancer | |
| A602F2 | TCAATAATGACGTATGTTCCCAT | CMV promoter + | 373 |
| | AG | enhancer | |
| A602R2 | CTTARATAGACCTCCCACCGTAC | CMV promoter + | 374 |
| | AC | enhancer | |
| A603F1 | CCATAGTCCCGCCCCTAA | SV40 promoter | 375 |
| A603R1 | TCGGCCTCTGCATAAATAAAA | SV40 promoter | 376 |
| A603F2 | CAGCAACCAGGTGTGGGAAA | SV40 promoter | 377 |
| A603R2 | AAAGCCTAGGCCTCCAAAAA | SV40 promoter | 378 |
| A604F1 | GCGGAACCCCTATTTGTTTATT | SV40 promoter + | 379 |
| | | enhancer | |
| A604R1 | TTCCACAGCTGGTTCTTTCC | SV40 promoter + | 380 |
| | | enhancer | |
| A604F2 | TCCGCTCATGAGACAATAACC | SV40 promoter + | 381 |
| | | enhancer | |
| A604R2 | AGTTAGGGGGGGGACTATG | SV40 promoter + | 382 |
| | | enhancer | |

[0639] Table 3 provides a list of exemplary constructs. The constructs were used by multiple sequence pulses electroporation for the transformation of Chlorella vulgaris to generate cells line producers of MEVs endo-loaded with tailored mRNAs, proteins, and/or RNAi.

TABLE 3
List of plasmids

| Plasmid | | | | | Resistance | Seq |
|---|---|---|---|---|---|---|
| name # | Promoter | Type | CDS | Terminator | Gene | ID # |
| pAGS-0001 | EF2 | constitutive | fLUC modified | RBCS | Hygromycin | 238 |
| | (Phaeodactylum | | codon to Chlorella | | | |
| | tricornutum) | | GC content | | | |
| pAGS-0002 | Histone 4 | constitutive | fLUC modified | RBCS | Hygromycin | 239 |
| | (Penicillium | | codon to Chlorella | | | |
| | funiculosum) | | GC content | | | |
| pAGS-0003 | Lhcf.1 | inducible | fLUC modified | RBCS | Hygromycin | 240 |
| | (Phaeodactylum | (light) | codon to Chlorella | | | |
| | tricornutum) | | GC content | | | |
| pAGS-0004 | Ubi.U4 | constitutive | fLUC modified | RBCS | Hygromycin | 241 |
| | (Nicotiana | | codon to Chlorella | | | |
| | tabacum) | | GC content | | | |
| pAGS-0005 | CAM 35S | constitutive | fLUC modified | RBCS | Hygromycin | 242 |
| | (Cauliflower | | codon to Chlorella | | | |
| | mosaic | | GC content | | | |
| | virus) | | | | | |
| pAGS-0006 | MAS | constitutive | fLUC modified | RBCS | Hygromycin | 243 |
| | (Agrobacterium | | codon to Chlorella | | | |
| | tumefaciens) | | GC content | | | |
| pAGS-0007 | PAR | inducible | fLUC modified | RBCS | Hygromycin | 244 |
| | (Arabidopsis | (light) | codon to Chlorella | | | |
| | thaliana) | | GC content | | | |
| pAGS-0008 | Cv PAS D | inducible | fLUC modified | RBCS | Hygromycin | 245 |
| | (Chlorella | (light and | codon to Chlorella | | | |
| | vulgaris) | stress) | GC content | | | |
| pAGS-0009 | CMV | Constitutive | fLUC modified | RBCS | Hygromycin | 246 |
| | | | codon to Chlorella | | | |
| | | | GC content | | | |
| pAGS-0010 | CMV + | Constitutive | fLUC modified | RBCS | Hygromycin | 247 |
| | enhancer | | codon to Chlorella | | | |
| | | | GC content | | | |
| pAGS-0011 | SV40 | Constitutive | fLUC modified | RBCS | Hygromycin | 248 |
| | | | codon to Chlorella | | | |
| | | | GC content | | | |
| pAGS-0012 | SV40 + | Constitutive | fLUC modified | RBCS | Hygromycin | 249 |
| | enhancer | | codon to Chlorella | | | |
| | | | GC content | | | |
| pAGS-0013 | EF2 | Constitutive | eGFP modified | RBCS | Hygromycin | 250 |
| | (Phaeodactylum | | codon to Chlorella | | | |
| | tricornutum) | | GC content | | | |
| pAGS-0014 | Histone 4 | Constitutive | eGFP modified | RBCS | Hygromycin | 251 |
| | (Penicillium | | codon to Chlorella | | | |
| | funiculosum) | | GC content | | | |
| pAGS-0015 | Lhcf.1 | inducible | eGFP modified | RBCS | Hygromycin | 252 |
| | (Phaeordactium | (light) | codon to Chlorella | | | |
| | tricornutum) | | GC content | | | |
| pAGS-0016 | Ubi.U4 | constitutive | eGFP modified | RBCS | Hygromycin | 253 |
| | (Nicotiana | | codon to Chlorella | | | |
| | tabacum) | | GC content | | | |
| pAGS-0017 | CAM 35S | constitutive | eGFP modified | RBCS | Hygromycin | 254 |
| | (Cauliflower | | codon to Chlorella | | | |
| | mosaic | | GC content | | | |
| | virus) | | | | | |
| pAGS-0018 | MAS | constitutive | eGFP modified | RBCS | Hygromycin | 255 |
| | (Agrobacterium | | codon to Chlorella | | | |
| | tumefaciens) | | GC content | | | |
| pAGS-0019 | PAR | inducible | eGFP modified | RBCS | Hygromycin | 256 |
| | (Arabidopsis | (light) | codon to Chlorella | | | |
| | thaliana) | | GC content | | | |
| pAGS-0020 | Cv PAS D | inducible | eGFP modified | RBCS | Hygromycin | 257 |
| | (Chlorella | (light and | codon to Chlorella | | | |
| | vulgaris) | stress) | GC content | | | |
| pAGS-0021 | CMV | constitutive | eGFP modified | RBCS | Hygromycin | 258 |
| | | | codon to Chlorella | | | |
| | | | GC content | | | |
| pAGS-0022 | CMV + | constitutive | eGFP modified | RBCS | Hygromycin | 259 |
| | enhancer | | codon to Chlorella | | | |
| | | | GC content | | | |
| pAGS-0023 | SV40 | constitutive | eGFP modified | RBCS | Hygromycin | 260 |
| | | | codon to Chlorella | | | |
| | | | GC content | | | |
| pAGS-0024 | SV40 + | constitutive | eGFP modified | RBCS | Hygromycin | 261 |
| | enhancer | | codon to Chlorella | | | |
| | | | GC content | | | |
| pAGS-0025 | EF2 | constitutive | eGFP non | RBCS | Hygromycin | 262 |
| | (Phaeodactylum | | modified | | | |
| | tricornutum) | | sequence | | | |
| pAGS-0026 | Histone 4 | constitutive | eGFP non | RBCS | Hygromycin | 263 |
| | (Penicillium | | modified | | | |
| | foniculosum) | | sequence | | | |
| pAGS-0027 | Lhcf.1 | inducible | eGFP non | RBCS | Hygromycin | 264 |
| | (Phaeordactium | (light) | modified | | | |
| | tricornutum) | | sequence | | | |
| pAGS-0028 | Ubi.U4 | constitutive | eGFP non | RBCS | Hygromycin | 265 |
| | (Nicotiana | | modified | | | |
| | tabacum) | | sequence | | | |
| pAGS-0029 | CAM 35S | constitutive | eGFP non | RBCS | Hygromycin | 266 |
| | (Cauliflower | | modified | | | |
| | mosaic | | sequence | | | |
| | virus) | | | | | |
| pAGS-0030 | MAS | constitutive | eGFP non | RBCS | Hygromycin | 267 |
| | (Agrobacterium | | modified | | | |
| | tumefaciens) | | sequence | | | |
| pAGS-0031 | PAR | inducible | eGFP non | RBCS | Hygromycin | 268 |
| | (Arabidopsis | (light) | modified | | | |
| | thaliana) | | sequence | | | |
| pAGS-0032 | Cv PAS D | inducible | eGFP non | RBCS | Hygromycin | 269 |
| | (Chlorella | (light and | modified | | | |
| | vulgaris) | stress) | sequence | | | |
| pAGS-0033 | CMV | constitutive | eGFP non | RBCS | Hygromycin | 270 |
| | | | modified | | | |
| | | | sequence | | | |
| pAGS-0034 | CMV + | constitutive | eGFP non | RBCS | Hygromycin | 271 |
| | enhancer | | modified | | | |
| | | | sequence | | | |
| pAGS-0035 | SV40 | constitutive | eGFP non | RBCS | Hygromycin | 272 |
| | | | modified | | | |
| | | | sequence | | | |
| pAGS-0036 | SV40 + | constitutive | eGFP non | RBCS | Hygromycin | 273 |
| | enhancer | | modified | | | |
| | | | sequence | | | |
| pAGS-0037 | EF2 | constitutive | eGFP non | RBCS | Hygromycin | 274 |
| | (Phaeodactylum | | modified | | | |
| | tricornutum) | | sequence | | | |
| pAGS-0038 | Histone 4 | constitutive | fLUC non | RBCS | Hygromycin | 275 |
| | (Penicillium | | modified | | | |
| | funiculosum) | | sequence | | | |
| pAGS-0039 | Lhcf.1 | inducible | fLUC non | RBCS | Hygromycin | 276 |
| | (Phaeodactylum | (light) | modified | | | |
| | tricornutum) | | sequence | | | |
| pAGS-0040 | Ubi.U4 | constitutive | fLUC non | RBCS | Hygromycin | 277 |
| | (Nicotiana | | modified | | | |
| | tabacum) | | sequence | | | |
| pAGS-0041 | CAM 35S | constitutive | fLUC non | RBCS | Hygromycin | 278 |
| | (Cauliflower | | modified | | | |
| | mosaic | | sequence | | | |
| | virus) | | | | | |
| pAGS-0042 | MAS | constitutive | fLUC non | RBCS | Hygromycin | 279 |
| | (Agrobacterium | | modified | | | |
| | tumefaciens) | | sequence | | | |
| pAGS-0043 | PAR | inducible | fLUC non | RBCS | Hygromycin | 280 |
| | (Arabidopsis | (light) | modified | | | |
| | thaliana) | | sequence | | | |
| pAGS-0044 | Cv PAS D | inducible | fLUC non | RBCS | Hygromycin | 281 |
| | (Chlorella | (light and | modified | | | |
| | vulgaris) | stress) | sequence | | | |
| pAGS-0045 | CMV | constitutive | fLUC non | RBCS | Hygromycin | 282 |
| | | | modified | | | |
| | | | sequence | | | |
| pAGS-0046 | CMV + | constitutive | fLUC non | RBCS | Hygromycin | 283 |
| | enhancer | | modified | | | |
| | | | sequence | | | |
| pAGS-0047 | SV40 | constitutive | fLUC non | RBCS | Hygromycin | 284 |
| | | | modified | | | |
| | | | sequence | | | |
| pAGS-0048 | SV40 + | constitutive | fLUC non | RBCS | Hygromycin | 285 |
| | enhancer | | modified | | | |
| | | | sequence | | | |
| pAGS-0049 | EF2 | constitutive | eGFP modified | RBCS | Kanamycin | 286 |
| | (Phaeodactylum | | codon to Chlorella | | | |
| | tricornutum) | | GC content | | | |
| pAGS-0050 | Histone 4 | constitutive | eGFP modified | RBCS | Kanamycin | 287 |
| | (Penicillium | | codon to Chlorella | | | |
| | funiculosum) | | GC content | | | |
| pAGS-0051 | Lhcf.1 | inducible | eGFP modified | RBCS | Kanamycin | 288 |
| | (Phaeodactylum | (light) | codon to Chlorella | | | |
| | tricornutum) | | GC content | | | |
| pAGS-0052 | Ubi.U4 | constitutive | eGFP modified | RBCS | Kanamycin | 289 |
| | (Nicotiana | | codon to Chlorella | | | |
| | tabacum) | | GC content | | | |
| pAGS-0053 | CAM 35S | constitutive | eGFP modified | RBCS | Kanamycin | 290 |
| | (Cauliflower | | codon to Chlorella | | | |
| | mosaic | | GC content | | | |
| | virus) | | | | | |
| pAGS-0054 | MAS | constitutive | eGFP modified | RBCS | Kanamycin | 291 |
| | (Agrobacterium | | codon to Chlorella | | | |
| | tumefaciens) | | GC content | | | |
| pAGS-0055 | PAR | inducible | eGFP modified | RBCS | Kanamycin | 292 |
| | (Arabidopsis | (light) | codon to Chlorella | | | |
| | thaliana) | | GC content | | | |
| pAGS-0056 | Cv PAS D | inducible | eGFP modified | RBCS | Kanamycin | 293 |
| | (Chlorella | (light and | codon to Chlorella | | | |
| | vulgaris) | stress) | GC content | | | |
| pIT 69 | CAM 35S | constitutive | siRNA anti fLUC | RBCS | Hygromycin | 294 |
| | (Cauliflower | | | | | |
| | mosaic | | | | | |
| | virus) | | | | | |

FIG. 11 depicts the structure of the T-DNA in the Ti plasmids provided herein. Plasmid sequences, as depicted, are written from LB (left border of the T-DNA (transferred DNA) element in the Ti plasmid) to RB (right border of the T-DNA element) as shown in FIG. 11.

### 2. Transformation by Multisequence Pulses

[0640] Cells of Chlorella vulgaris in the exponential growth phase are electroporated using a Nepa21 type II Electroporator (Nepa Gene), as follows: after determination of the number of cells/mL, aliquots of ten million cells per aliquot are placed in separate 1.5 mL Eppendorf tubes (one tube per transformation condition) in 100 μL of BG-11 media plus 0.7 M of mannitol; 6 μg (in 20 μL at maximum) of linearized (or not) plasmids are added to the cell suspensions. The preparations are homogenized by tapping the tubes, then placing them into electroporation chambers of 2 mm of diameter (EC002S; Sonidel) and electroporated. The conditions of electroporation are described in Tables 4.

TABLE 4A
Conditions for poring Chlorella cells
First Sequence: Poring Pulses

| | Pulse | Interval between | Pulse | Decay | |
|---|---|---|---|---|---|
| Voltage | Time (ms) | Pulses (ms) | Number | rate (%) | Polarity |
| 300 | 5 | 50 | 7 | 10 | non |

TABLE 4B
Conditions for transferring DNA into Chlorella cells
Second Sequence: Transferring Pulses

| | Pulse | Interval between | Pulse | Decay | |
|---|---|---|---|---|---|
| Voltage | Time (ms) | Pulses (ms) | Number | rate (%) | Polarity |
| 8 | 50 | 50 | 5 | 40 | non |

[0641] After transformation, Chlorella cells are diluted in 4 mL BG-11 medium+0.7M mannitol in T25 flasks. Cells are incubated in a refrigerated incubator, at 25° C. overnight, protected from light. The next day, they are resuspended using a sterile pipette, and transferred into 15 mL Falcon tubes. Cells are centrifuged 5 min at 700 g, the supernatant removed and resuspended in 200 μL of BG-11 media. The total volume (200 μL) of each cell suspension is plated on Agar/BG-11 agar plates with hygromycin (70 μg/mL) or kanamycin (100 μg/mL) according to the plasmid vector used for transformation, and incubated in the refrigerated incubator at 25° C., for 12 hours light/12 hours dark (12 L/12D). Clones are visible at day 10 and are harvested for PCR screening at day 15.

### 3. Clone Screening

[0642] For each transformation, 5 to 10 clones are picked and cultured in BG-11 medium containing an antibiotic (either 70 mg/mL of Hygromycin or 100 mg/mL of Kanamycin). After 10 days of culture clones are tested to identify positive clones, and in parallel frozen for banking.

[0643] Positive clones are identified by PCR using the corresponding primers in the following list, that match the coding regions of either the resistance gene or the transgene, or the promoter region of the vector. The sequences of primers used for the screening are listed in Table 5. Screening is performed by either multiplex or simplex PCR analysis. PCR conditions are also described in Table 5.

The number of positive clones obtained after the multiple sequence pulses is an average of 4 out of 10 clones picked.

TABLE 5
PCR conditions for the screening of Chlorella producer cell lines

| SEQ ID | Primer | | Start | Length | TM | GC | PCR band |
|---|---|---|---|---|---|---|---|
| # | Name # | 3′ sequence 5′ | (bp) | (bp) | (° C.) | (%) | length (bp) |
| 295 | A407F1 | CAAAGATACAG | 22 | 27 | 61 | 41 | 342 from |
| | | TCTCAGAAGAC | | | | | Cam35S |
| | | CAAAG | | | | | promoter |
| 296 | A407R1 | GAAGGGTCTTG | 364 | 21 | 60 | 52 | |
| | | CGAAGGATAG | | | | | |
| 297 | A407F2 | GAAGACCAAAG | 38 | 22 | 60 | 45 | 256 from |
| | | GGCTATTGAGA | | | | | Cam35S |
| 298 | A407R2 | CTTGCTTTGAA | 293 | 21 | 61 | 48 | promoter |
| | | GACGTGGTTG | | | | | |
| 299 | A401F1 | GATTCGTTCCC | 87 | 19 | 60 | 52 | 220 from EF2 |
| | | GTCACAGA | | | | | promoter |
| 300 | A401R1 | AAGATTCACCA | 306 | 20 | 60 | 50 | |
| | | CGGCTTCAC | | | | | |
| 301 | A401F2 | CCTTCCATTTTG | 9 | 22 | 61 | 41 | 324 from EF2 |
| | | ACATGTTTCC | | | | | promoter |
| 302 | A401R2 | TGTGTGGAGAG | 332 | 20 | 60 | 55 | |
| | | AACGAGCAG | | | | | |
| 303 | A403F1 | AAGTATGGCGC | 371 | 29 | 60 | 50 | 227 from H4 |
| | | AGGTATGGT | | | | | promoter |
| 304 | A403R1 | GCGAATTGTGA | 597 | 20 | 60 | 50 | |
| | | GTGCTTCCT | | | | | |
| 305 | A403F3 | AGGTCCGTGGA | 50 | 19 | 60 | 58 | 521 from H4 |
| | | CTTCTGGT | | | | | promoter |
| 306 | A403R3 | GTTCACAGGCC | 570 | 20 | 60 | 55 | |
| | | GTAGGTTTC | | | | | |
| 307 | A405F1 | GGATTATCACC | 23 | 21 | 60 | 38 | 103 from |
| | | GCAAAAATGA | | | | | Lhcf1 |
| 308 | A405R1 | TATTTGCTACCAG | 125 | 23 | 61 | 43 | promoter |
| | | AGCAATCCAC | | | | | |
| 309 | A405F2 | GGAGGATTATC | 20 | 20 | 60 | 45 | 130 from |
| | | ACCGCAAAA | | | | | Lhcf1 |
| 310 | A405R2 | ATGTTGAGCCAA | 149 | 23 | 60 | 43 | promoter |
| | | TCTAGCAGAAG | | | | | |
| 311 | A427F1 | CAAAGATACAG | 22 | 27 | 61 | 41 | 341 from |
| | | TCTCAGAAGAC | | | | | MAS |
| | | CAAAG | | | | | promoter |
| 312 | A427R1 | GAAGGGTCTTG | 364 | 21 | 60 | 52 | |
| | | CGAAGGATAG | | | | | |
| 313 | A427F2 | GAAGACCAAAG | 38 | 22 | 60 | 45 | 255 from |
| | | GGCTATTGAGA | | | | | MAS |
| 314 | A427R2 | CTTGCTTTGAA | 293 | 21 | 61 | 48 | promoter |
| | | GACGTGGTTG | | | | | |
| 315 | E001F1 | TGAAATGGAAA | 196 | 21 | 60 | 38 | 50 from |
| | | TGGATGGAGA | | | | | terminator |
| 316 | E001R1 | TTGAGAATGAA | 255 | 22 | 60 | 36 | |
| | | CAAAAGGACCA | | | | | |
| 317 | E001F2 | TCATGGATTTG | 578 | 27 | 60 | 30 | 86 from |
| | | TAGTTGAGTAT | | | | | terminator |
| | | GAAAA | | | | | |
| 318 | E001R2 | CATAGTCGATT | 664 | 22 | 59 | 45 | |
| | | GATGCATGTTG | | | | | |
| 319 | A431F1 | GCACCCATCCG | 145 | 20 | 60 | 50 | 212 from |
| | | GTATAAAAG | | | | | PAR |
| 320 | A431R1 | TAAGGGTTGCA | 356 | 20 | 60 | 45 | promoter |
| | | AGTGCTCAA | | | | | |
| 321 | A431F2 | TGAGGCTTGAC | 8 | 19 | 60 | 45 | 349 from |
| | | ATGATTGGT | | | | | PAR |
| 322 | A431R2 | TAAGGGTTGCA | 356 | 20 | 60 | 45 | promoter |
| | | AGTGCTCAA | | | | | |
| 323 | A432F1 | ACACCTACCGA | 339 | 19 | 60 | 53 | 88 from Cv- |
| | | TGCGTGAA | | | | | PSAD |
| 324 | A432R1 | CTCGGAACGAC | 426 | 20 | 60 | 55 | promoter |
| | | GACAAGAAG | | | | | |
| 325 | A432F2 | TCTCAGCATGC | 178 | 20 | 60 | 50 | 243from Cv- |
| | | CTCAACAAC | | | | | PSAD |
| 326 | A432R2 | CTCGGAACGAC | 420 | 19 | 60 | 52 | promoter |
| | | GACAAGAA | | | | | |
| 327 | fLUCF1 | CTACGGCCTGA | 218 | 19 | 59 | 58 | 72 from |
| | | ACACCAAC | | | | | fLUC MC |
| 328 | fLUCR1 | AGCACGGGCAT | 289 | 18 | 60 | 56 | |
| | | GAAGAAC | | | | | |
| 329 | fLUCF2 | CCATCTTCGGC | 685 | 18 | 61 | 56 | 130 from |
| | | AACCAGA | | | | | fLUC MC |
| 330 | fLUCR2 | AAGCGGTACAT | 814 | 19 | 60 | 53 | |
| | | CAGCACCA | | | | | |
| 331 | fLUCF3 | CTTCTTCGAGG | 1112 | 19 | 61 | 58 | 182 from |
| | | CCAAGGTG | | | | | fLUC MC |
| 332 | fLUCR3 | CGTCCCAGTAG | 1293 | 18 | 60 | 61 | |
| | | GCGATGT | | | | | |
| 333 | fLUCF4 | AAGACCATGAC | 1482 | 20 | 60 | 50 | 157 from |
| | | CGAGAAGGA | | | | | fLUC MC |
| 334 | fLUCR4 | TTGGCCTTGAT | 1639 | 20 | 60 | 50 | |
| | | CAGGATCTC | | | | | |
| 335 | eGFPF1 | CAGAAGAACGG | 472 | 20 | 60 | 50 | 144 from |
| | | CATCAAGGT | | | | | eGFP |
| 336 | eGFPR1 | CTGGGTGCTCA | 615 | 20 | 60 | 60 | |
| | | GGTAGTGGT | | | | | |
| 337 | eGFPF2 | CCCGACCACAT | 226 | 18 | 61 | 61 | 86 from |
| | | GAAGCAG | | | | | eGFP |
| 338 | eGFPR2 | TCGTCCTTGAA | 311 | 20 | 57 | 45 | |
| | | GAAGATGGT | | | | | |
| 339 | eGFPF3 | AGGAGCGCACC | 284 | 19 | 60 | 52 | 212 from |
| | | ATCTTCTT | | | | | eGFP |
| 340 | eGFPR3 | GTTCACCTTGA | 495 | 20 | 60 | 50 | |
| | | TGCCGTTCT | | | | | |
| 341 | eGFPF4 | GGCAAGCTGAC | 121 | 19 | 60 | 57 | 365 from |
| | | CCTGAAGT | | | | | eGFP |
| 342 | eGFPR4 | ATGCCGTTCTTC | 485 | 20 | 60 | 50 | |
| | | TGCTTGTC | | | | | |
| 343 | fLUC2F1 | ATTCTTTATGCC | 261 | 20 | 60 | 45 | 114 from |
| | | GGTGTTGG | | | | | fLUC |
| 344 | fLUC2R1 | ACGGTAGGCTG | 374 | 18 | 60 | 56 | |
| | | CGAAATG | | | | | |
| 345 | fLUC2F2 | TGTCGCTCTGC | 621 | 20 | 60 | 50 | 121 from |
| | | CTCATAGAA | | | | | fLUC |
| 346 | fLUC2R2 | AAAACCGTGAT | 741 | 20 | 60 | 40 | |
| | | GGAATGGAA | | | | | |
| 347 | fLUC2F3 | CGCGGTCGGTA | 1080 | 19 | 61 | 53 | 98 from |
| | | AAGTTGTT | | | | | fLUC |
| 348 | fLUC2R3 | TCACACACAGT | 1177 | 20 | 60 | 50 | |
| | | TCGCCTCTT | | | | | |
| 349 | fLUC2F4 | TGACGGAAAAA | 1478 | 20 | 59 | 45 | 50 from |
| | | GAGATCGTG | | | | | fLUC |
| 350 | fLUC2R4 | CGCGGTTGTTA | 1527 | 20 | 62 | 55 | |
| | | CTTGACTGG | | | | | |
| 351 | F005F4 | TGAAATGGAAA | 1696 | 20 | 61 | 55 | 55 from |
| | | TGGATGGAGA | | | | | Hygromycin |
| 352 | F005R4 | TTGAGAATGAA | 1751 | 20 | 60 | 50 | |
| | | CAAAAGGACCA | | | | | |
| 353 | F005F5 | TCATGGATTTG | 1994 | 20 | 59 | 40 | 81 from |
| | | TAGTTGAGTAT | | | | | Hygromycin |
| | | GAAAA | | | | | |
| 354 | F005R5 | CATAGTCGATT | 2074 | 21 | 59 | 42 | |
| | | GATGCATGTTG | | | | | |
| 355 | F005F1 | CGTTCGATCCC | 391 | 19 | 61 | 38 | 90 from |
| | | AATTTCGT | | | | | Hygromycin |
| 356 | F005R1 | TGATATCTAACG | 481 | 24 | 60 | 61 | |
| | | ATCAAACCCAGA | | | | | |
| 357 | F005F2 | AAAAGTTCGAC | 739 | 20 | 60 | 50 | 87 from |
| | | AGCGTCTCC | | | | | Hygromycin |
| 358 | F005R2 | TATCCACGCCC | 826 | 20 | 60 | 55 | |
| | | TCCTACATC | | | | | |
| 359 | F005F3 | CAAGGAATCGGT | 1104 | 24 | 60 | 42 | 51 from |
| | | CAATACACTACA | | | | | Hygromycin |
| 360 | F005R3 | AGCAATCGCGC | 1154 | 19 | 60 | 42 | |
| | | ATATGAAA | | | | | |
| 361 | KanF1 | CGAGGCATGAT | 291 | 20 | 60 | 45 | 80 from |
| | | TGAACAAGA | | | | | Kanamycin |
| 362 | KanR1 | GCCCAGTCATA | 370 | 20 | 60 | 55 | |
| | | GCCGAATAG | | | | | |
| 363 | KanF2 | GCCGTTTTACG | 60 | 20 | 59 | 45 | 112 from |
| | | TTTGGAACT | | | | | Kanamycin |
| 364 | KanR2 | AACGCGCAATA | 171 | 20 | 60 | 40 | |
| | | ATGGTTTCT | | | | | |
| 365 | KanF3 | GGATGATCTGG | 761 | 20 | 60 | 55 | 140 from |
| | | ACGAAGAGC | | | | | Kanamycin |
| 366 | KanR3 | GGCCATTTTCC | 900 | 20 | 60 | 45 | |
| | | ACCATGATA | | | | | |

[0644] After screening, 24 positive clones of Chlorella producer cell lines are produced, MEVs are collected and semi-purified as described in Example 1B. The resulting semi-purified MEVs are tested to verify the presence of the endo-loaded cargo, as described below in Example 4.

### E. Storage of Chlorella Modified Producer Cell Lines. Cryopreservation of Chlorella vulgaris Cells

[0645] Two conditions of cryopreservation and storage of isolated cells from Chlorella vulgaris in exponential growing state and in stationary state are evaluated. The first condition corresponds to the standard method recommended by UTEX collection using 10% methanol as a cryoprotective agent in BG-11 medium and the second condition using 25% glycerol in BG-11 medium as routinely used for animal cell lines.

[0646] Both cryo-storage conditions are evaluated in exponential growing phase (4-5×10⁶ cells) or stationary phase (3-5×10⁷ cells). After congelation, the cells are thawed at 37° C. Cell viability is determined in BG-11 medium for 5 days (liquid medium) or BG-11 solid medium (stria) for 15 days culture. Viability is determined after one or two cycles of freezing/thawing at 3 days and 30 days (one cycle) or 30, 60, 180 days (two cycles).

[0647] A higher viability and a better reproducibility of the results is obtained with the 25% of glycerol in BG-11 medium (freezing medium), with Chlorella cells in exponential growing phase and a dilution of 100 mL of cryomedium in 5 mL BG-11 medium liquid culture as thawing culture conditions.

### F. Determination of the Genetic Stability of Chlorella Producer Cell Lines. PCR Detection of Chlorella Transformants

[0648] Genomic DNA from transformed and wild-type (WT) Chlorella strains is isolated from exponentially growing cultures using NucleoSpin DNA protocol. Genomic DNA concentration is measured using a QuBit® fluorometer.

[0649] The genetic stability of Chlorella producer cell lines is performed by PCR analysis to detect the presence and the persistence of either the hygromycin resistance gene (using specific primers as described above (Example 3b) or firefly luciferase primers (f-LUC1-5′-CCAGGGATTTCAGTCGATGT-3′ and f-LUC2-5′-AATCTCACGCAGGCAGTTCT-3′), or GFP (SEQ ID NOs: 68 and 69) or eGFP (SEQ ID NOs: 80 and 81), or mCherry (SEQ ID NOs: 82 and 83), or GUS (SEQ ID NOs: 84 and 85) as described below (Example 4).

### Example 4

### Endo-Loaded MEV Characterization

### A. Quantification of GFP Fluorescence in Transformed Chlorella Cell Lines and in Isolated MEVs

[0650] The parental strain of Chlorella is transformed with Green Fluorescent Protein (GFP)-coding sequence using plasmids pAGS-0013 to pAGS-0024 or pAGS-0049 to pAGS-0056, as described in Example 3. The GFP fluorescence intensity is examined on a microplate reader (Molecular Device Co, Spectra Max M2). GFP samples are prepared by serial twofold dilution with phosphate buffered saline (PBS, 137 mM NaCl, 2.6 mM KCl, 10 mM Na₂HPO₄, and 1.8 mM KH₂PO₄, pH 7.4) and 50 μl of each sample was added to black-wall 96-well plates (Corning), in duplicate. The excitation and emission wavelengths are 485 and 538 nm, respectively. All measurements are performed at room temperature and the reading of non-transformed parental Chlorella cells is subtracted before graphing.

[0651] After isolation of MEVs endo-loaded with the GFP protein, the MEVs are analyzed for size and fluorescence (size distribution). The Zeta View® nanoparticle tracking analyzer (NTA) from Particle Metrix is a Nanoparticle Tracking Analysis engine. Equipment is calibrated before the experiment according to the manufacturer's recommendations with polystyrene beads. The phosphate buffered saline (PBS) used for the day's experiments is evaluated with the Zeta View® NTA (normal average number of particles on screen in PBS: 0-5). Samples are diluted with PBS to be measured by Zeta View® NTA within the manufacturer's recommended reading range (50-200 particles per frame). Dilutions are made in PBS, then the sample is vortexed and placed in a 1 ml syringe for the analysis.

[0652] The samples are analyzed with the Zeta View® NTA in scatter mode (laser 488 nm) to determine the number and size distribution of the particles. The samples are then analyzed for fluorescence with the Zeta View® NTA using a laser at 488 nm and a fluorescence filter at 500 nm at different percentages of sensitivity (95%, 90% and 88%). The analog view of the Zeta View® NTA is activated during the fluorescence analysis to visualize the background noise.

### B. Enzymatic Activity of MEVs Endo-Loaded with GUS Protein

[0653] The parental strain of Chlorella is transformed with an expression vector encoding β-Glucuronidase (GUS) protein (SEQ ID NO:79) under control of a constitutive promoter. Successful transformants are selected for antibiotic resistance as described above. The modified Chlorella is cultured and MEVs are isolated from the engineered strain to confirm their cargo. Protein content is detected in the MEVs by Western blot analysis, while the enzymatic activity is determined by hydrolysis of 5-bromo-4-chloro-3-indolyl-beta-D-glucuronic acid (X-gluc) producing DiX-indigo and measured using light microscopy. Activity is calculated as percentage of blue cells.

### C. Bioluminescence Quantification from MEVs Endo-Loaded with Luciferase Protein

[0654] The parental strain of Chlorella is transformed with firefly luciferase (luc)-coding sequence using plasmids pAGS-0001 to pAGS-0012, as described in Example 3. To measure the luciferase activity, the cell density of each transgenic cell culture is so adjusted that optical density (OD) 750 nm=0.5 at the mid-log phase. Cells are harvested from 1 mL of cell culture by centrifugation (4000×g for 3 min) and used for the luciferase activity assay. Luciferase activity is measured using the firefly-Luciferase Assay Kit (Promega, Madison, WI, USA), according to manufacturer's protocol with slight modifications. Cell pellets are resuspended in 100 μL of cell lysis buffer and mixed vigorously by vortexing for 2-3 min. The resuspension is then centrifuged at 13,000 rpm for 5 min at 4° C. After centrifugation, 90 μL of the supernatant is transferred to a new tube and 10 μL of luciferase substrate is added to it. After mixing the supernatant and substrate, the luminescence is measured immediately using Glo Max™ 20/20 (Promega, Fitchburg, WI, USA). The luciferase assay is repeated three times.

### D. Total RNA Extraction from Endo-Loaded MEVs, mRNA Detection and Quantification by RT-qPCR

### 1. Total RNA Isolation from MEV Endo-Loaded with mRNA

[0655] Total RNA from isolated and purified MEVs endo-loaded with mRNA (1,5×10¹⁰ MEVs) are obtained using RNeasy Minikit (Qiagen). The final volume after isolation is 20 μL.

### 2. Reverse Transcription (RT SuperscriptII)

[0656] For the RT, 8 μL of isolated total RNA is mixed with 1.6 μL of Mix A (Hexamer Random Primer (500 ng/μl) Ref C118A from Promega. Hexamer (250 ng/RT in 20 μl) plus DNTP mix 10 mM (each); final concentration in each tube: Oligo hexamer 0.4 μl+DNTP 0.8 μL+H₂O 0.4 μl. Each tube is centrifuged 10 s, incubated at 65° C. 5 min, chilled into Eppendorf® plate at −20° C. and centrifuged 10 s. Next, the samples are incubated at 25° C. after adding 6.4 μl MixB/tube. Mix B (5x First Strand buffer (reference 18064-014), 3.2 μl+0.1 M DTT (P/N y0014 reference 18064-014) 1.6 μl+Recombinant Rnasin (Ref N251A) ribonuclease inhibitor 0.8 μl and 0.8 μl of Superscript II (reference 100004925). Incubation goes for 12 min. Then incubation at 42° C. for 50 min and then incubation at 70° C. for 15 min and finally at 4° C.

### 3. qPCR (Light Cycler 480 Roche)

[0657] qPCR is done adding Mix 1 (cDNA/3 μl+H₂O if needed) to the Mix 2 (specific primers F+R as given below) 2 μl+Takyon No ROX SYBR 2X MasterMix blue dTTP (Eurogentec, UF-NSMT-B0701) 5 μl) final volume of 10 μl into a 384 well plate (LightCycler® 480 Multiwell plate 384 clear, Roche, 5102430001).

[0658] The plate is sealed with a transparent film and centrifuged for 3 to 5 min (1500 rpm).

[0659] The amplification run is launched with the “2-step run protocol” template:
[0660] Denaturation: 95° C. for 10 min.
[0661] 45 PCR cycles: 95° C. for 10 s, then 60° C. for 40 s.

[0662] Primer sequences for detection and quantification of GFP, mCherry, which is a constitutively red fluorescent protein, and beta-glucuronidase (GUS) are as follows:

eGFP(1-1) For3Rev3 400 nM
eGFP(1-1) F3
(SEQ ID NO: 80)
CACATGAAGCAGCACGACTT
eGFP(1-1) R3
(SEQ ID NO: 81)
GCGCGGGTCTTGTAGTTG
mCherry(1-1) For1Rev1 500 nM
mCherry(1-1) F1
(SEQ ID NO: 82)
GACCACCTACAAGGCCAAGA
mCherry(1-1) R1
(SEQ ID NO: 83)
CCGCTCGTACTGCTCCAC
Gus (1-1) For1Rev1 500 nM
Gus F1
(SEQ ID NO: 84)
CGCTCACACCGATACCATCA
Gus R1
(SEQ ID NO: 85)
CGGCTGATGCAGTTTCTCCT
GFP(1-1) For1Rev1 400 nM
GFP(1-1) F1
(SEQ ID NO: 68)
GTCCAGGAGCGCACCATCTTCT
GFP(1-1) R1
(SEQ ID NO: 69)
GATGCCCTTCAGCTCGATGCGGTT

### E. Quantification of Protein Endo-Loaded in MEV (by Western Blot)

[0663] Expression of the cargo protein is verified using SDS-PAGE followed by Western blot analysis. Semi-purified MEVs, semi-purified as described in Example 1b), are lysed on ice in RIPA buffer supplemented with β-mercaptoethanol (Sigma-Aldrich). Then, 30 μg of proteins are boiled and subjected to SDS-PAGE and transferred to nitrocellulose membranes (Bio-Rad). The blots are blocked with Tris buffered saline (TBS), 0.1% Tween-20 containing 5% BSA and incubated overnight at 4° C. with the relevant antibodies specific to the cargo protein. Subsequently, the blots are incubated with the relevant HRP-conjugated secondary antibody for 1 h at room temperature. Signals are revealed by chemiluminescence (Thermo Fisher Scientific).

### F. Quantification of GFP Protein Endo-Loaded in MEV. Fluorescence Readout by Zeta View® Nanoparticle Tracking Analyzer

[0664] The Zeta View® nanoparticle tracking analyzer (NTA) from Particle Metrix is a Nanoparticle Tracking Analysis engine. Equipment is calibrated before the experiment according to the manufacturer's recommendations with polystyrene beads. The phosphate buffered saline (PBS) used for the day's experiments is evaluated with the Zeta View® NTA (normal average number of particles on screen in PBS: 0-5). Samples are diluted with PBS to be measured by Zeta View® NTA within the manufacturer's recommended reading range (50-200 particles per frame). Dilutions are made in PBS, then the sample is vortexed and placed in a 1 ml syringe for the analysis.

[0665] The samples are analyzed with the Zeta View® NTA in scatter mode (laser 488 nm) to determine the number and size distribution of the particles. The samples are then analyzed for fluorescence with the Zeta View® NTA using a laser at 488 nm and a fluorescence filter at 500 nm at different percentages of sensitivity (95%, 90% and 88%). The analog view of the ZetaView® NTA is activated during the fluorescence analysis to visualize the background noise.

### G. Quantification of Catalase in Endo-Loaded MEVs

[0666] Protein content is detected in the MEVs by Western blot analysis, while the enzymatic activity is determined by the decomposition of H₂O₂, measured spectrophotometrically by following the decrease in absorbance at 240 nm. Activity is calculated using the extinction coefficient (e=40 mM⁻¹ cm⁻¹) and a unit of CAT is defined as micromoles of decomposed H₂O₂ per gram of dry weight (DW) per minute. The specific enzyme activity for the enzyme is expressed as units per milligram of protein (1 U=1 mol/min).

[0667] H. Quantification of total proteins and preparation for Western blot analysis

[0668] Total proteins are quantified by microBCA or Bradford test. Proteins are quantified using a spectrophotometer (in cuvettes) that measures protein concentration at OD595 nm (selecting “Bradford”) on the spectrophotometer. The reagent used is Bio-Rad Protein Assay Dye Reagent concentrate Cat #5000006 (stored at 4° C., taken out of the refrigerator 10 minutes before use to bring it to room temperature). Samples are measured in 1 ml cuvettes (Fisherbrand FB55143):
[0669] For the Blank: 200 μl Bradford reagent 5x+800 μl water is prepared.
[0670] For the Samples: 200 μl Bradford reagent 5x+800 μl sample in water is prepared. After quantification, samples are diluted to 60 μg protein in a maximum volume of 40 μL, 4 μl (bromophenol blue) 2X Laemmli buffer is added to the buffer to each sample and heated at 95° C. for 5 min. The tubes then are centrifuged to recover condensate.

### Example 5

Pharmacokinetics and biodistribution of MEVs following intranasal application

[0671] MEVs produced, purified, characterized, and labelled with DiR as described in in Examples 1 and 2, above (see, also copending International PCT application No. PCT/EP2022/070371, published Jan. 26, 2023, as International PCT publication No. WO2023/001894, which describes exogenous loading, and copending U.S. provisional application Ser. No. 63/349,006, which describes endogenous loading) were administered to C57BL/6 mice by intranasal administration. Mice were euthanatized at several time points (1 h, 2 h, 4 h and 8 h) after single intranasal administration (20 mL in each nostril) per animal; the brains were carefully isolated; brains were sectioned, embedded in OCT at max. 30 min post sampling and sliced at different distance of the bregma and kinetics thereof (see, FIGS. 21A-31B). FIG. 14 shows a positive control DiR-MEV on DAPI-stained brain slice in which a drop of MEV suspension was deposited on top of a brain tissue slide; the puncta are DiR-labeled MEV.

### A. Intranasal Administration

[0672] Mice were housed in Makrolon® polycarbonate cages with filter hoods, in a room where the air is continuously filtered to avoid contamination. During experiments, paired animals were caged at a constant temperature with a day/night cycle of 12/12 hours.

[0673] Animals received water (control tap water) and nutrition ad libitum. Animal health was examined every day to ensure that only animals in good health enter to the testing procedures and follow up to the study. At the beginning of the study, animals were identified with a number on the tail and separated in 5 groups:
[0674] Group 1: PBS-treated animals and sampling at 1 h
[0675] Group 2: MEV treated animals and sampling at 1 h
[0676] Group 3: MEV treated animals and sampling at 2 h
[0677] Group 4: MEV treated animals and sampling at 4 h
[0678] Group 5: MEV treated animals and sampling at 8 h

[0679] Intranasal compound administration was made using a dominant hand, the micropipette was loaded with 20 μl of MEV (for the first nostril). The tip of the filled pipette was placed near the mouse's left nostril, usually at a 45-degree angle. The droplet was placed close enough to the mouse's nostril so that the mouse could inhale the droplet. This procedure was reproduced for the second nostril. A total of 40 μl of MEV per animal was administrated. After full administration, the mouse was held in this position for 15 seconds.

### B. Organ Sampling

[0680] Mice were sacrificed by cervical dislocation. The temporal bone was opened, and the brain was sampled. Each sample rapidly was segmented into five parts (see, FIGS. 21A-G), placed in single cryoblocks, and embedded with O.C.T. compound using isopentane and stored at −80° C. Samples were cryosectioned, and labeled with DAPI fluorescent staining and/or Cresyl violet staining.

### C. Imaging and Data Analysis

[0681] The slide images were analyzed to determine the presence of MEV-labelled with DiR in DAPI and cresyl violet staining using an Akoya Phenochart™ whole slide viewer. Descriptive analysis by groups was expressed as mean±SD for continuous variables. Each brain was analyzed independently. The cresyl violet staining was used to reference-estimate the DiR analyzed brain areas for each section.

[0682] Quantification of MEV-DiR in the brain section 1 (+3.92 mm from the bregma). For the section 1, the MEV-DiR was detected in left and right olfactory nerve layer from 1-hour post administration reaching a plateau at 4 hours post administration (see FIGS. 22A-D and 23).

[0683] Quantification MEV-DiR in the brain section 2 (+1.78 mm from bregma). A progressive increase of MEV-DiR normalized intensity and number was observed in the primary motor cortex, piriform cortex, frontal cortex and agranular insular cortex from 2-hours post administration. Even if the number of animals per time-point was too small to profile a precise PK curve, the graphical representations suggest the MEVs reached a plateau in the primary motor cortex, frontal cortex and agranular insular cortex at 8 hours post administration (FIGS. 24A-D and 25A-D). Data indicate a progressive diffusion of the MEVs through primary motor cortex, piriform cortex, frontal cortex and agranular insular cortex when administrated by the IN route in mice.

[0684] Quantification of MEV-DiR in the brain section 3 (−1.82 mm from bregma). A progressive increase of MEV-DiR normalized intensity and number was observed in the primary somatosensory cortex, auditory cortex, basolateral amygdaloid nucleus, retrosplenial granular cortex, temporal association cortex and the arcuate hypothalamic nucleus from 2-hour post administration. Even if the number of animals per time-point was too small to profile a precise PK curve, the graphical representations suggest the MEVs reached a plateau in the primary somatosensory cortex, auditory cortex, basolateral amygdaloid nucleus and the retrosplenial granular cortex, but not in the temporal association cortex and the arcuate hypothalamic nucleus, at 8 hours post administration (FIGS. 26A-D and 27A-F). These data indicate a progressive diffusion of the MEVs in the described brain regions when administrated by the IN route in mice.

[0685] Quantification of MEV-DiR in the brain section 4 (−2.70 mm from bregma). A progressive increase of MEV-DiR normalized intensity and number was observed in the amygdala, left and right auditory cortex, temporal association cortex and ectorhinal cortex, the left and right primary visual cortex and the mammillary nucleus from 4-hour posts administration (FIGS. 28A-D and 29A-D). These data indicate a progressive diffusion of the MEVs in the described caudal brain regions when administrated by the IN route in mice.

[0686] Quantification of the MEV-DiR in the brain section 5 (−5.20 mm from bregma). No MEV-DiR was detected in the principal trigeminal nucleus, inferior colliculus and tegmental nucleus, parabrachial nucleus and cerebellar peduncle and any other caudal area at the analyzed time point. The lack of MEV-DiR can be explained by a lack of diffusion into these brain areas up to 8 hours post administration (FIG. 30A-D).

[0687] These results show that the intranasal administration of the MEVs leads to a progressive biodistribution of the vesicles in different but specific brain areas. This biodistribution is time-dependent and observed from the rostral to the caudal regions of the mouse brain (FIG. 31A-B). One hour after MEVs administration, the vesicles were specifically detected in the olfactory nerve layer but not in other more caudal regions. At two hours post MEV administration, the vesicles reached cortical regions and reached primary motor cortex, piriform cortex, frontal cortex, agranular insular cortex, primary somatosensory cortex, auditory cortex, retrosplenial granular cortex and temporal association cortex. MEVs also were found in basolateral amygdaloid nucleus, and the arcuate hypothalamic nucleus. No fluorescent signal was detected in the hippocampal regions, caudate putamen or in the nucleus accumbens. At four hours post administration, the MEV migrated up to the caudal brain regions reaching the amygdala, the left and right auditory cortex, the temporal association cortex and the ectorhinal cortex. No labelling was observed in hippocampus or substantia nigra. No vesicles were detected in the most caudal section examined where important structures, such as the trigeminal nucleus, inferior colliculus, tegmental nucleus, and parabrachial nucleus from 1 to 8 hours post administration indicating that the vesicles did not reach the most caudal part of the brain during the analyzed time points.

[0688] It is known that direct nose-to-brain transport of drugs and biologics (proteins, oligonucleotides, or viral vectors) is feasible via the olfactory or trigeminal nerve system. Olfactory nerve axons originating in the olfactory bulb (OB) penetrate the cribriform plate and terminate at the apical surface of the olfactory neuroepithelium; it is located at the roof of the nasal cavity. Filaments of the olfactory nerves are present in the anterior and in the posterior parts at the middle turbinate. The respiratory mucosa is densely innervated by sensory and parasympathetic trigeminal nerves and is more extensive than the olfactory nerve. Sensory maxillary branches innervate the deepest nasal segments, including the olfactory cleft. The pathways traversed by the MEVs, as shown herein, however are different.

[0689] FIGS. 21A-G provide: (i) a general overview of the experimental design of brain biodistribution studies; and (ii) the positions of the 5 brain sections studied; (FIGS. 21C-G) the regions analyzed to determine the PK and biodistribution of MEVs in each of the 5 brain sections studied. The graphs depict and identify regions of the brain for reference with the FIGS. 22A-D, 24A-D, 26A-D, 28A-D and 30A-D that show MEVs in the brain following IN administration.

### Example 6

In vitro delivery of cargo by the Microalgae Extracellular Vesicles (MEVs) in primary and established cell lines

### A. Cell Culture

[0690] Human primary cells (keratinocytes from skin; primary hepatocytes from healthy volunteers or patients) or established cell lines (A459 (lung), PC12 (neuronal), HEK293, and tumoral cell lines) are cultured in specific optimal conditions for each type of cells. The cells are grown in 75 cm² flasks, incubated at 37° C. with 100% humidity and 5% CO₂. The culture medium is changed every 2 days to ensure the growth of cells and to avoid contamination. Once reached sub-confluence, the cells are detached from the bottom of the flask with trypsin (0.25%), centrifuged (1600 g, 4 min), re-suspended in fresh culture medium and seeded at 2×10⁵ cells/plate.

### B. Uptake of Loaded MEVs by Neuronal Cells-Microplate Assay

[0691] PC12 neuronal cells are used as a model for in vitro evaluation of neuroprotective effects. Briefly, PC12 cells are seeded into 96-well plate (50,000 cells/well) and cultured for three days. Next, the catalase carrying MEVs (loaded as described above) are stained with DiR (5 μg/mL) and added to the wells in serial dilutions for various times. Following the incubation, the cells are washed three times with ice-cold PBS and solubilized in 1% Triton X-100. The sample fluorescence is measured using a SpectraMax® fluorescence microplate reader (Molecular Devices, USA) with excitation at 750 nm and emission at 780 nm. The amount of MEVs accumulated in neuronal cells is normalized for total protein content and expressed as the number of MEVs per mg of protein. All MEV formulations are prepared at the same level of fluorescence, and a separate calibration curve is used for each MEV formulation.

### C. Uptake of Loaded MEVs by Neuronal Cells-Confocal Microscopy

[0692] The catalase loaded MEVs (100 μg/mL total protein) are sonicated, stained with DiR (5 μg/mL) and incubated with PC12 cells grown on chamber slides (1×10⁵ cells/chamber) for various time intervals. Following the incubation, the cells are washed with PBS, fixed in 4% paraformaldehyde and permeabilized with 0.1% Triton X-100. Fluorescent staining is performed using anti-actin antibody (Abcam ab179467, 1:100) with goat anti-rabbit IgG Alexa Fluor 488 (Abcam ab 150077, 1:1000) as the secondary antibody. DAPI (4′,6-diamidino-2-phenylindole) is used as nuclear counterstain prior to the imaging. Accumulation of fluorescently labelled MEVs is visualized by a LSM700 laser scanning confocal microscope (Zeiss) and images are processed with LSM Image Browser.

### D. Neuroprotective Effects of the Loaded MEVs

[0693] The protection of PC12 cells against 6-OHDA-induced cytotoxicity is assessed by MTT assay. For this purpose, PC12 cells (1×10⁵ cells/mL) are seeded into a 96-well plate and allowed to attach overnight. Then, the cells are exposed to 200 μM 6-hydroxydopamine (6-OHDA) and different catalase-loaded MEV formulations, or catalase alone, or empty MEVs for four hours. Following the incubation, the cells are washed 3 times with ice-cold PBS, and incubated with the corresponding catalase loaded MEV formulations, or catalase alone, or empty MEVs for another 24 hours. Following the treatment, 20 μL of MTT tetrazolium dye solution (5 mg/mL) is added into each well. After 3 hours of incubation at 37° C., the MTT-containing medium is removed and 100 μL DMSO is added into each well to dissolve the purple formazan precipitate. Absorbance is measured at 570 nm using a SpectraMax® microplate reader (Molecular Devices, USA) and cell viability is expressed as a percentage of viable cells in the treated groups compared to the untreated control group.

### E. MEV Internalization in Human Cancer Cells

[0694] HeLa cell line of human cervix epithelioid carcinoma is used to study uptake of GFP-loaded MEVs. For flow cytometry analysis, the cells are seeded in 24-well plates (15,000 cells/well). After 24 h, cells are incubated with the cargo-loaded MEVs for 4 h and subsequently washed with PBS, washed again with acid wash buffer (0.5 M NaCl, 0.2 M acetic acid) to remove membrane-bound MEVs and once more with PBS. Cells are detached with trypsin, fixed in 0.2% paraformaldehyde in PBS and analyzed using LSRII flow cytometer with CellQuest Pro software (BD Biosciences). For confocal microscopy analysis, HeLa cells are seeded in 16-well chamber slides (Lab-Tek) at 4,000 cells/well. After 24 h, cells are incubated with the cargo-loaded MEVs for 4 h and subsequently washed with PBS, washed again with acid wash buffer (0.5 M NaCl, 0.2 M acetic acid) to remove membrane-bound MEVs and once more with PBS. Cells are fixed with 4% paraformaldehyde in PBS at room temperature for 20 min. Slides are then washed with PBS and mounted using Fluorsave (Calbiochem). Confocal fluorescent imaging is performed using a LSM700 laser scanning confocal microscope (Zeiss) and images are processed with LSM Image Browser.

### F. Study of the Internalization of MEVs Loaded with GFP (Green Fluorescent Protein) in Normal Human Hepatocytes

### 1. Effect of MEVs on Primary Human Hepatocytes PHH Viability

[0695] PHHs (1×10⁵ cells/mL) are seeded into a 96-well plate and allowed to attach overnight. Then, the cells are exposed to different cargo loaded MEV formulations or empty MEVs for four hours. Following the incubation, 20 μL of MTT tetrazolium dye solution (5 mg/mL) is added into each well. After 3 hours of incubation at 37° C., the MTT-containing medium is removed and 100 μL DMSO is added into each well to dissolve the purple formazan precipitate. Absorbance is measured at 570 nm using a SpectraMax® microplate reader (Molecular Devices, USA) and cell viability is expressed as a percentage of viable cells in the treated groups compared to the untreated control group.

### 2. MEV Internalization in Primary Human Hepatocytes (PHH)

[0696] The internalization of the GFP-protein-cargo-loaded MEVs in PHHis determined by flow cytometry. For flow cytometry analysis, cells are seeded in 24-well plates (15,000 cells/well). After 24 h, cells are incubated with the MEVs for 4 h and subsequently washed with PBS, washed again with acid wash buffer (0.5 M NaCl, 0.2 M acetic acid) to remove membrane bound MEVs and once more with PBS. Cells are detached with trypsin, fixed in 0.2% paraformaldehyde in PBS and analyzed using LSRII flow cytometer with CellQuest Pro software (BD Biosciences). For confocal microscopy analysis, cells are seeded in 16-well chamber slides (Lab-Tek) at 4,000 cells/well. After 24 h, cells are incubated with the MEVs for 4 h and subsequently washed with PBS, washed again with acid wash buffer (0.5 M NaCl, 0.2 M acetic acid) to remove membrane bound MEVs and once more with PBS. Cells are fixed with 4% paraformaldehyde in PBS at room temperature for 20 min. Slides are then washed with PBS and mounted using Fluorsave (Calbiochem). Confocal fluorescent imaging is performed using a LSM700 laser scanning confocal microscope (Zeiss) and images are processed with LSM Image Browser.

### G. Delivery and Expression of the GFP mRNA Loaded in MEVs in Human Cells

### 1. mRNA translation studies

[0697] The delivery and biological activity in hepatocytes of the GFP-mRNA-cargo-loaded MEVs is determined by total RNA extracted from the cells using the RNeasy Minikit (Qiagen) according to the manufacturer's instructions. Then, 500 ng of total RNA is reverse transcribed into cDNA using a reverse transcriptase (Promega) and real-time PCR is performed using the LightCycler 480 SYBR Green I Master Kit on an LC480 device (both from Roche Diagnostics). The mRNA level is calculated by normalizing the threshold cycle (CT) of target genes to the CT of the 28S ribosomal RNA housekeeping gene. The primers are designed using primer software from Roche Diagnostics and are purchased from Eurogentec.

### 2. Protein Expression Studies

[0698] The delivery and biological activity in hepatocytes of the GFP-protein-cargo-loaded MEVs is determined by SDS-PAGE followed by Western blot analysis. Cells are lysed on ice in RIPA buffer supplemented with β-mercaptoethanol (Sigma-Aldrich). Then, 30 μg of proteins are boiled and subjected to SDS-PAGE and transferred to nitrocellulose membranes (Bio-Rad). The blots are blocked with Tris buffered saline (TBS), 0.1% Tween-20 containing 5% BSA and incubated overnight at 4° C. with the following antibodies. Subsequently, the blots are incubated with the relevant HRP-conjugated secondary antibody for 1 h at room temperature. Signals are revealed by chemiluminescence (Thermo Fisher Scientific).

### H. Delivery and Expression of the Payload in Normal Human Keratinocytes Cellular Uptake of GFP-Loaded MEVs

[0699] The delivery and expression of the payload in keratinocytes is studied by confocal microscopy. MEVs are loaded with GFP protein as described above, added to the cells at various concentrations, and incubated at 37° C. for 2, 4, 8, and 24 h. The cells subsequently are washed twice with RPMI1640, fixed with 4% paraformaldehyde in PBS (pH 7.4), and treated with Triton X-100 (0.1%) to increase the permeability of the cell membrane. The fixed cells are washed with PBS and then stained with Hoechst blue to visualize the cell nucleus, and with phalloidin-fluorescein isothiocyanate conjugate for staining the actin cytoskeleton. After staining, the cells are washed again with PBS, and allowed to dry overnight. Microscopic images are obtained using an inverted confocal microscope FluoView FV1000 (Olympus) equipped with a 20× UPlanSApo objective. GFP and Hoechs are visualized with a wavelength of excitation/emission of 559/578 nm and 360/460 nm, respectively.

### I. Delivery and Expression of Payload in Human Cancer Cell Lines

### 1. Cellular Uptake of GFP-Loaded MEVs

[0700] The internalization, delivery and expression of payload (GFP) in cancer cells is studied by confocal microscopy. The experiments are performed on sub-confluent cells grown on glass slides. MEVs are added to the cells at various concentrations, and incubated at 37° C. for 2, 4, 8, and 24 h. The cells subsequently are washed twice with RPMI1640, fixed with 4% paraformaldehyde in PBS (pH 7.4), and treated with Triton X-100 (0.1%) to increase the permeability of the cell membrane. The fixed cells are washed with PBS and then stained with Hoechst blue to visualize the cell nucleus, and with phalloidin-fluorescein isothiocyanate conjugate for staining the actin cytoskeleton. After staining, the cells are washed again with PBS, and allowed to dry overnight. Microscopic images are obtained using an inverted confocal microscope FluoView FV1000 (Olympus) equipped with a 20× UPlanSApo objective. GFP and Hoechs are visualized with a wavelength of excitation/emission of 559/578 nm and 360/460 nm, respectively.

### 2. RT-PCR Analysis and Gel Electrophoresis

[0701] The cells (1×10⁶) are grown in culture plates for 24 h. Next, the loaded MEVs carrying siRNA, or empty MEVs, or siRNA alone, are added to the wells in serial dilutions and incubated for 1-24 hours. Following the incubation, the medium is changed for the normal culture medium. 72 h after the MEV treatment, total RNA is extracted from the cultured cells using Trizol reagent. The RNA precipitate is centrifuged and dissolved in 20 μl of RNase-free water. UV spectrophotometer analysis at 260/280 nm and agarose gel electrophoresis are used to confirm the quality of purified RNA. 1 μg of total RNA is reverse transcribed to synthesize cDNA at 42° C. for 1 h; this cDNA is then subjected to PCR amplification with specific primers in 25-μl reactions. Next, the PCR products are resolved on 2% agarose gel, stained with ethidium bromide, and observed with a UV trans-illuminator. The digital images are quantified with ImageJ analysis software and the results are expressed as the relative expression level of relevant genes over GAPDH.

### 3. Gene Expression Analysis by RT-qPCR

[0702] The cells treated with the MEVs and cultured for a total of 72 h are trypsinized and washed with PBS. Total RNA is extracted from the cell pellets using the RNeasy Minikit (Qiagen) according to the manufacturer's instructions. Then, 500 ng of total RNA is reverse transcribed into cDNA using a reverse transcriptase (Promega) and real-time PCR is performed using the LightCycler 480 SYBR Green I Master Kit on an LC480 device (both from Roche Diagnostics). The mRNA level is calculated by normalizing the threshold cycle (CT) of target genes to the CT of the 18S ribosomal RNA housekeeping gene. The primers are designed using primer software from Roche Diagnostics and are purchased from Eurogentec.

### 4. Western Blot Analysis

[0703] The cells (2×10⁶) treated with the MEVs and cultured for a total of 72 are trypsinized, washed with PBS and lysed on ice in RIPA buffer supplemented with β-mercaptoethanol (Sigma-Aldrich). Then, 50 μg samples of total protein are subjected to 10% standard sodium dodecyl sulfate-polyacrylamide gel electrophoresis (SDS-PAGE), with pre-stained molecular weight markers run in parallel. Subsequently, the resolved proteins are electro-transferred onto PVDF membranes. After extensive washing, the membranes are incubated with the relevant horseradish peroxidase-conjugated antibody (Sigma-Aldrich) for 1 h at room temperature and developed with a chemiluminescence detection kit (Thermo Fisher Scientific). Membranes probed for the oncoproteins are re-probed for β-actin to normalize for loading and/or quantification errors and to allow comparisons of target protein expression. The protein expression is quantified with a gel analysis system (Bio-Rad). 5. Cell proliferation assay

[0704] The cells are seeded into 96-well plate (10,000 cells/well) and allowed to attach for 18 h. Next, the cells are treated with the MEVs as above; at 72 h after the treatment, 10 μl 10 mg/ml MTT is added to the cells in each well. The cells are incubated for 4 h, after which 100 μl DMSO is added, and the cells are allowed to lyse for 15 min. All of the analyses are carried out in triplicate. Optical density at 492 nm is determined with a SpectraMax® microplate reader (Molecular Devices, USA). To determine the inhibitor rate, the absorbance values are then normalized to the values obtained from the blank control cells.

### Example 7

Targeting Neuronal Cells with Microalgae Extracellular Vesicles (MEVs). Biological Activity of Protein- and mRNA-Loaded Microalgae Extracellular Vesicles (MEVs) in Neurons In Vitro

### 1. Overexpression/Rescue in KO Neuronal Mouse Culture by MEV Carrying GABABla mRNA

[0705] Pyramidal cells in DIV10-14 hippocampal dissociated cultures from GABABla” mice are analyzed using whole-cell patch clamp technique, recording of spontaneous excitatory activity (sEPSCs). Cultures are either untreated or preincubated with MEVs at different concentrations (from 10⁶ to 5×10¹⁰ particles) or preincubation periods (from 0.5 to 24 hours). For each cell, baseline signal is recorded for 3 mins and compared with post-application baclofen (20 μM) recording to assess rescue efficacy. The analysis includes sEPSCs frequency, amplitude and membrane parameters (Rm, Rs, Cm).

### 2. Expression of GFP Protein in Neuronal Mouse Culture by MEV Carrying eGFP Protein or eGFP mRNA

[0706] Pyramidal cells in DIV10-14 hippocampal dissociated cultures from mice are analyzed for the expression of eGFP marker. The experiments are performed on sub-confluent neuronal cells grown on glass slides. MEVs are loaded with GFP protein as described above, added to the cells at various concentrations, and incubated at 37° C. for 2, 4, 8, and 24 h. The cells subsequently are washed twice, fixed with 4% paraformaldehyde in PBS (pH 7.4), and treated with Triton X-100 (0.1%) to increase the permeability of the cell membrane. The fixed cells are washed with PBS and then stained with Hoechst blue to visualize the cell nucleus, and with phalloidin-fluorescein isothiocyanate conjugate for staining the actin cytoskeleton. After staining, the cells are washed again with PBS, and allowed to dry overnight. Microscopic images are obtained using an inverted confocal microscope FluoView FV1000 (Olympus) equipped with a 20× UPlanSApo objective. GFP and Hoechs are visualized with a wavelength of excitation/emission of 559/578 nm and 360/460 nm, respectively.

### Example 8

### A. Evaluation of Toxicity on MEVs in Mice

[0707] Experiments were performed to assess the signs of MEV toxicity in vivo using Balb/C mouse model after oral and intratracheal administration.

Analysis of MEV toxicity in vivo:

[0708] Toxicity was evaluated in several ways: clinical signs, body weights, hematological analysis, biochemical analysis, histological analysis on main organs (liver, spleen, kidney, lung and brain). The MEV samples were stored at −80° C. and thawed just prior to in vivo administrations. After thawing, each sample was mixed by vigorous vortexing for 1-2 minutes. Male Balb/C mice at 5 weeks of age and with a mass about 20 g each, were used. Animals were acclimatized. Animals were housed in polyethylene cages (<5 animals/cage), in a controlled environment with 12:12 light-dark at the temperature of 24±1° C. (mean±SD) and fed once daily with an adapted pelleted feed. Water was offered ad libitum. The animals were randomly assigned to experimental groups and acclimatized for at least 7 days before the initiation of the designed study.

[0709] The experiment was designed to determine the eventual toxicity of the test compound after its administration in mice through exemplary routes including oral, and respiratory tract (intratracheal) routes. As described above, male Balb/C mice, with a mass about 20 g each, were used. Animals were acclimatized. After a test item is administered, all mice are closely monitored for 10 days.

### Clinical Evaluation

[0710] Daily clinical examination of all animals included, observation of behavior and signs of suffering (cachexia, weakening, difficulty for moving or feeding, etc.); test item toxicity (hunching, convulsions), and other such parameters. Determination of body weight once a week for each animal, a body weight curve was designed (Mean±SD). Observation of acute reactions was done after administration of the tested compounds.

### Clinical Pathology Investigations

[0711] After the end of the in-life phase, all animals were euthanized. Clinical pathology investigations were performed at experiment termination.

### Blood Collection

[0712] The blood samples were collected from mice by intracardiac puncture into different vials. Aliquots of blood were collected for various clinical pathology investigations into tubes containing anticoagulants: for hematology analysis with K2 EDTA and for biochemistry analysis with lithium heparin.

### Clinical Chemistry

[0713] Plasma was separated after centrifugation of whole blood samples, 45000 rpm for 15 minutes and analyzed for the following parameters at the end of treatment for all animals. Clinical chemistry analysis parameters are indicated as: Alanine, Aminotransferase (ALT), Aspartate Aminotransferase (AST), and Gamma-glutamyl transferase (GGT) in units per liter (U/L); Urea in g/L and Creatinine in mg/L.

### Hematology

[0714] The following hematological parameters were determined at the end of treatment of all animals: Hemoglobin (HGB) in g/L; Hematocrit (HCT) in L/L; Mean Corpuscular Volume (MCV) in fL, eosinophils (EO) and MHCH (BASO) as 10⁹/L. When animals are euthanatized, an autopsy is performed, and a careful macroscopic evaluation is performed. If any organs look abnormal, a detailed description and analysis is performed.

### Histological Analysis

[0715] Histological analysis is performed for the 5 following organs: Lung, Spleen, Liver, Kidney, and Brain. The organs are collected, weighed, macroscopically observed, fixed in 4% Paraformaldehyde (PFA) and paraffin-embedded, cut into 5-7 μM sections and then observed under fluorescence microscope.

### Histopathological Scoring

[0716] Each H&E (hematoxylin- and eosin-stained) section was thoroughly examined histologically, and lesions observed were recorded in an Excel spreadsheet, their severity graded (minimal, mild, moderate, or severe). Their distribution also was characterized (i.e., as focal, multifocal, focally extensive or diffuse), as well as, their localization.

### B. Toxicity Study Results: Clinical Examinations

### Clinical Chemistry

[0717] As shown below, two parameters Urea and Creatinine did not change in all treated groups compared to control groups. The enzymes Alanine Aminotransferase (ALT) and Aspartate Aminotransferase (AST) show random non-significant deviations. FIGS. 36A-D present these results. The parameter Gamma-glutamyl transferase value is detected at low level (<6) in all groups indicating a protocol error and are not presented.

The results of the clinical chemistry parameters do not indicate any toxicity at all tested doses in the mice either by oral or intratracheal administration.

### Hematology

[0718] The measured parameters were not significantly changed compared to controls. FIGS. 36A-I present the results in which MEV toxicity was evaluated by (1) chemistry parameters: ALAT, ASAT, urea and creatine; and (2) by hematology parameters in four groups of mice: Group 1 mice were administered 100 μl of PBS by PO delivery (white bars); Group 2 mice were administered 100 μl of 4*10¹¹ MEVs/mouse by PO delivery (bar with black and white tiles); Group 3 mice were administered 100 μl of 4*10¹² MEVs/mouse by PO delivery (white bars with vertical black lines); Group 4 mice were administered 100 μl of 4*10¹¹ MEVs/mouse by IT delivery (white bars with black squares).

[0719] The results present blood parameters that can be altered when there is one or more of blood-, kidney-, and liver-related toxicity. Hematocrit, hemoglobin, eosinophil levels, RBC count, and volume (MCV) are hematologic parameters; urea and creatine are biochemical markers of kidney injury; ALAT (or ALT) and ASAT (or AST) are biochemical markers of liver injury. Alanine transaminase (ALT), also called alanine aminotransferase (ALAT), is a transaminase enzyme that occurs in plasma and in various body tissues, but most commonly in the liver. Significantly elevated levels of ALT can be related to liver-related problems, such as hepatitis and/or liver damage. Aspartate transaminase (AST), also known as aspartate aminotransferase (ASAT), is another transaminase enzyme important in amino acid metabolism. Beyond liver toxicity, AST can be elevated also in diseases affecting other organs. Serum ALT level, serum AST level, and their ratio (AST/ALT ratio) are used clinically as biomarkers for liver health. In the instant study, no statistically-significant differences between experimental groups in ALT and AST levels were observed.

[0720] Eosinophils (eosinophiles) are a variety of white blood cells and one of the immune system components responsible for combating multicellular parasites and certain infections in vertebrates. Eosinophils usually account for less than 7% of the circulating leukocytes. Beyond causes related to infection or parasitic infestation, elevated eosinophil levels (also known as eosinophilia) can be also a sign of allergic or atopic reactions. In the instant study no statistically significant differences between experimental groups in eosinophil levels were observed.

[0721] FIGS. 36A-I. depict the clinical chemistry and Hematology results in mice after administration (PO, IT) of MEV.

### Histology

[0722] The main organs were collected, fixed in 4% PFA, paraffin-embedded, cut into sections and stained with H&E.

### Lung

[0723] Histopathological changes observed in lung sections are primarily limited to minimal to mild focal to multifocal alveolar hemorrhages in 8/10 lung sections examined in animals receiving intratracheal negative control material and test item. Changes were relatively subtle and limited in some of the alveolar spaces. This observation was observed at comparable incidence and severity in negative control and treated animals.

### Kidney

[0724] Presence of a few basophilic tubules were observed in 1 animal treated PO with 4×10¹¹ MEV dose. This finding was minimal in severity and often is observed spontaneously at low incidence and severity in laboratory rodent animals. It is therefore considered as incidental in origin in the present study.

### Spleen, Liver, and Brain

[0725] No histopathological changes were observed in spleen, brain, or liver in all sections examined.

### SUMMARY

[0726] The pulmonary changes observed in most animals receiving the experimental material intra-tracheally were considered not treatment related. There was no treatment-related observed in all organs examined, indicating that MEVs are not toxic to animals under the experimental conditions.

### CONCLUSION

[0727] Regarding the clinical aspects, all the animals, at each time of the study, exhibited normal behaviors, body weight, water and food consumption. The clinical findings indicate general tolerance in the mouse model of the test MEV products. Under the experimental conditions, both negative controls (PBS) and MEV at concentration of 4*10¹¹ MEV/mouse or 4*10¹² MEV/mouse by oral administration and at concentration of 4*10¹¹ MEV/mouse by IT administration did not induce any abnormal, toxic effect on animals.

### Example 9

In vitro modulation of human cancer cells by the Microalgae Extracellular Vesicles (MEVs)

### A. Cell Cultures

[0728] Human cell lines (ATCC) are grown in DMEM (Dulbecco's modified Eagle's medium) supplemented with 10% fetal bovine serum (FBS), 50 units/ml penicillin, and 50 μg/ml streptomycin. The cells are kept in culture at 37° C. and 5% CO₂, and the medium is changed every three days. To keep the cells at optimal proliferating conditions, they are passaged at 80% confluence and seeded at 20% confluence. The following cell lines are used in the study:
[0729] 1) MYC oncogene-expressing HT29 (colon cancer), PANC-1 (pancreatic cancer) and MYC-negative LN-18 (malignant glioma);
[0730] 2) RAS oncogene-expressing SCLC-21H (small-cell lung cancer), MCF-7 (breast cancer) and RAS-negative PC3 (prostate cancer);
[0731] 3) BCL-2 oncogene-expressing AsPC-1 (pancreatic cancer), U-937 (pro-monocytic myeloid leukemia) and BCL-2-negative LM-MEL-53 (malignant melanoma);
[0732] 4) PLK-1 oncogene-expressing HepG2 (hepatoma), PC3 (prostate cancer) and PLK-1-negative AsPC-1 (pancreatic cancer).

### B. RT-PCR Analysis and Gel Electrophoresis

[0733] The cells (1×10⁶) are grown in culture plates for 24 h. Next, the siRNA carrying MEVs, or empty MEVs, or siRNA alone, are added to the wells in serial dilutions and incubated for 1-24 hours. Following the incubation, the medium is changed for the normal culture medium. 72 h after the MEV treatment, total RNA is extracted from the cultured cells using Trizol reagent. The RNA precipitate is centrifuged and dissolved in 20 μl of RNase-free water. UV spectrophotometer analysis at 260/280 nm and agarose gel electrophoresis are used to confirm the quality of purified RNA. 1 μg of total RNA is reverse transcribed to synthesize cDNA at 42° C. for 1 h; this cDNA is then subjected to PCR amplification with specific primers in 25-μl reactions. Next, the PCR products are resolved on 2% agarose gel, stained with ethidium bromide and observed with a UV trans-illuminator. The digital images are quantified with ImageJ analysis software and the results are expressed as the relative expression level of relevant genes over GAPDH.

### C. Gene Expression Analysis with Quantitative RT-PCR

[0734] The cells treated with the MEVs and cultured for a total of 72 h are trypsinized and washed with PBS. Total RNA is extracted from the cell pellets using the RNeasy® Minikit (Qiagen) according to the manufacturer's instructions. Then, 500 ng of total RNA is reverse transcribed into cDNA using a reverse transcriptase (Promega) and real-time PCR is performed using the LightCycler 480 SYBR Green I Master Kit on an LC480 device (both from Roche Diagnostics). The mRNA level is calculated by normalizing the threshold cycle (CT) of target genes to the CT of the 18S ribosomal RNA housekeeping gene. The primers are designed using primer software from Roche Diagnostics and are purchased from Eurogentec.

### D. Western Blot Analysis

[0735] The cells (2×10⁶) treated with the MEVs and cultured for a total of 72 h are trypsinized, washed with PBS and lysed on ice in RIPA buffer supplemented with β-mercaptoethanol (Sigma-Aldrich). Then, 50 μg samples of total protein are subjected to 10% standard sodium dodecyl sulfate-polyacrylamide gel electrophoresis (SDS-PAGE), with pre-stained molecular weight markers run in parallel. Subsequently, the resolved proteins are electro-transferred onto PVDF membranes. After extensive washing, the membranes are incubated with the relevant horseradish peroxidase-conjugated antibody (Sigma-Aldrich) for 1 h at room temperature, and developed with a chemiluminescence detection kit (Thermo Fisher Scientific). Membranes probed for the oncoproteins are re-probed for β-actin to normalize for loading and/or quantification errors and to allow comparisons of target protein expression. The protein expression is quantified with a gel analysis system (Bio-Rad).

### E. Cell Proliferation Assay

[0736] The cells are seeded into 96-well plate (10,000 cells/well) and allowed to attach for 18 h. Next, the cells are treated with the MEVs as above; at 24, 48, and 72 h after the treatment, 10 μl 10 mg/ml MTT is added to the cells in each well. The cells are incubated for 4 h, after which 100 μl DMSO is added, and the cells are allowed to lyse for 15 min. All of the analyses are carried out in triplicate. Optical density at 492 nm is determined with a SpectraMax® microplate reader (Molecular Devices, USA). To determine the inhibitor rate, the absorbance values are then normalized to the values obtained from the blank control cells.

### 1. Apoptotic Cell Morphology Observation

[0737] The cell morphology related to apoptotic cell death is established by staining the cell nuclei with the DNA-binding fluorochrome Hoechst 33258 and assessing the chromatin condensation by fluorescence microscopy. Briefly, the cells are seeded in 24-well plates with glass slides on the bottom of the wells, and treated with the MEVs as above. Afterwards, the slides are gently washed with cold PBS, fixed with 4% paraformaldehyde for 1 h and washed three times with PBS. The slides are stained with 0.5 ml Hoechst 33258 (10 μg/ml) at 37° C. for 10 min in a dark room. In each group, five microscopic fields are randomly selected, and one hundred cells are counted. The apoptotic cell level is then calculated as the percentage of apoptotic cells over the total number of fluorescent cells.

### 2. Fluorescent Analysis of Necrotic/Apoptotic Cell Death

[0738] For flow cytometry analysis, the cells are seeded in 24-well plates (15,000 cells/well). After 24 h, cells are treated with the MEVs as above. Subsequently, the cells are washed with PBS and detached with trypsin. Following fixing in 0.2% paraformaldehyde in PBS, the cells are labeled with Annexin V FITC/PI (Thermo Fisher Scientific) and analyzed using LSRII flow cytometer with Cell Quest Pro software (BD Biosciences).

### Example 10A

### In Vivo Biodistribution of Mevs

[0739] Experiments were performed to determine the pathway and fate of MEVs when administered via various routes.

### A. MEV Labelling Using DiR Fluorescent

[0740] As described in example 2, the fluorescent, lipophilic carbocyanine DiR (1,1-dioctadecyl-3,3,3,3-tetramethylindotricarbocyanine iodide) is weakly fluorescent in water but highly fluorescent and photostable when incorporated into membranes and can be tracked in vivo (see, Example 2 above; ThermoFisher Scientific). The DiR labelled (MEVs) are incubated with human cells. Their uptake by human cells is measured by fluorimetry analysis (fluorescence spectroscopy) on microplate readers. DiR has an excitation of 750 nm and an emission of 780 nm.

### 1. In Vivo Administration of DiR-Labelled MEV for Biodistribution Studies

[0741] The methodology for the biodistribution studies is summarized as follows: Chlorella cells were grown in the photobioreactor as described above (120 L per batch), were isolated and labeled with DiR, and labelling efficiency was assessed as described in Examples 1 and 2.

[0742] The labeled MEVs were administered to the mouse model animals via one of four routes, via: intranasal, intratracheal, oral, and intravenous administration, to determine the pathways and fate of the MEVs by each route. Treated mice were subjected to full body imaging as a function of time, and at day 3 mice were sacrificed and the organs were imaged ex vivo, and by histology in several mice organs after different routes of application.

[0743] MEVs' pharmacokinetics and biodistribution were studied in Specific Pathogen Free (SPF), 7-week old male Balb/cByJ mice (Charles River Laboratories). The animals were labelled with unique ear ID tags and acclimatized for at least 2 days. Background (control) mice were housed individually, while MEV-treated mice were housed collectively in disposable standard cages in ventilated racks at 21±3° C. (temperature recorded and controlled) with a 12 hr-12 hr light/dark cycle. Filtered water and low fluorescence laboratory food for rodents were provided ad libitum. All mice were euthanized at the end of the in vivo experiments.

[0744] The DiR-labelled MEVs (prepared as above in Example 2) were used to determine the biodistribution of the MEVs in the whole animal body or in several organs after different routes of application.

[0745] Prior to the imaging, the fur of each animal was clipped using an electric clipper in the following areas: abdomen, thorax, head, and whole back. Care was taken in order to clip the fur as homogeneously as possible. Next, DiR-labelled MEV preparations were re-suspended by vortexing before filling the syringes for injection.

[0746] The following routes were used to administer the MEVs to the animals: Intravenous (IV): 50 μL of MEV suspension containing 0.6×10¹² MEV/mL were injected in a tail vein by disposable plastic syringe and appropriate needle. Dosage of MEV administered: 3×10¹⁰ MEV/mouse.

Intranasal (IN): Animals were induced and maintained under anesthesia during IN administration by a mixture of isoflurane and oxygen as a carrier gas. A volume of 100 μL of MEV suspension containing 0.3×10¹² MEVs/mL was administered into the nostrils of the mouse using a thin pipette cone. Dosage of MEV administered: 3×10¹⁰ MEV/mouse.
Per os (PO): 100 μL of MEV suspension containing 0.3×10¹² MEVs/mL was administered orally using a disposable plastic syringe and an appropriate feeding probe. Dosage of MEV administered: 3×10¹⁰ MEVs/mouse.
Intratracheal (IT): Animals were induced and maintained under anesthesia during IT administration by a mixture of isoflurane and oxygen as a carrier gas. Once adequate anesthesia was observed, animals were placed on a mouse intubation platform, suspended from the front incisors in the supine position, to maximize view of the trachea. Then, a cold light was placed on the skin near the trachea localization in order to backlight the trachea. If needed, a laryngoscope was inserted to guide the syringe of a Microsprayer® sprayer into the trachea. An injection of 50 μL of MEV suspension containing 0.6×10¹² MEVs/mL was instilled into the trachea. Anesthesia was maintained throughout the procedure. After injection, the mice were maintained in the same position on the intubating platform for at least 30 seconds, before being replaced in their cage. Dosage of MEVs administered: 3×10¹⁰ MEVs/mouse.

### 2. In Vivo Imaging for Biodistribution Studies

[0747] Fluorescence acquisitions were performed with the IVIS® Spectrum optical imaging system (acquired from PerkinElmer). Bidimensional (2D) fluorescence imaging was performed by sensitive detection of light emitted by DiR-labelled MEVs. Mice were anesthetized and imaged 1 hour before MEV administration. Next, fluorescence of the material to be administered was confirmed with an in vitro acquisition performed on at least 1 drop of a minimum of 20 μL of MEV suspensions, deposited in 2 different Petri dishes. The fluorescence emission was measured and detected with the selected parameters (see below). Finally, in vivo fluorescence acquisitions were performed on mice administered MEVs. The animals were induced and maintained under anesthesia with a mixture of isoflurane and oxygen. Mice were positioned in dorsal recumbency to obtain ventral images and in ventral recumbency to obtain dorsal images. At least 2 acquisitions/mouse/timepoint were taken and mice were imaged in groups of maximum 3 mice/acquisition. Images were analyzed and fluorescence quantified on 6 organs (liver, spleen, lung, kidney, intestine, and brain).

[0748] The following timepoints were used (T0=MEV administration):
[0749] Day 0-6 timepoints: T0-1 h±10 min; T0+30 min±5 min; T0+2 h±15 min; T0+4 h±30 min; T0+8 h±30 min; T0+10 h±30 min
[0750] Day 1-1 timepoint: T0+24 h±3 h
[0751] Day 2-1 timepoint: T0+48 h±3 h
[0752] Day 3-1 timepoint: T0+72 h±3 h
   The data were analyzed with the IVIS software (Living Image Software for IVIS).

[0753] The following parameters were used for the in vivo and ex-vivo fluorescence acquisitions:

[0754] Field of View (FOV) 14×14 cm (FOV C)

[0755] Image number: In vivo: For each mouse at each applicable timepoint, at least 2 acquisitions (ventral and dorsal) were performed; 3 mice (at maximum) were imaged in one acquisition.
[0756] Ex-vivo: the organs of at least one mouse were imaged in one acquisition
[0757] Image format TIFF format
[0758] Fluorescent probe DiR
[0759] Excitation wavelength 745 nm
[0760] Emission wavelength 800 nm
[0761] Exposition time Automatic, depending on the fluorescence signal detected
[0762] Minimum counts 20000
[0763] Binning Between 16 and 1 (depending on the fluorescence signal detected)
[0764] F/STOP 2 (in case of fluorescence signal saturation it was automatically increased to 4 or it was decreased to 1 in case of weak signal)
[0765] Subject height In vivo: 1.5 cm
   [0766] Ex-vivo: 0.5 cm

### 3. Ex Vivo Imaging for Biodistribution Studies

[0767] Production, purification, characterization, labelling and administration (by different routes) of MEVs was as described above. On Day 3 after administration, mice were euthanized and the organs of interest of each mouse were sampled and positioned in a Petri dish in order to perform ex vivo acquisitions. The following organs were sampled: liver, spleen, lungs, kidneys, brain, and intestine. The data were analyzed with the IVIS software (Living Image Software for IVIS). FIG. 40 shows representative patterns of biodistribution according to the route of administration, for the Intravenous (IV), Intratracheal (IT), and Per os (PO) routes.

### B. CONCLUSIONS

### Pharmacokinetics

[0768] The pharmacokinetic curves demonstrating the accumulation as a percent of baseline over time (hours) after intravenous, Per os, intranasal, and intratracheal administration are set forth in FIGS. 6-9, respectively.

### Biodistribution-Isolated Organs-Ex Vivo Imaging

[0769] Biodistribution—in vivo full body imaging of a representative animal is depicted in FIG. 40. The biodistribution by ex vivo fluorescence analysis (total radiant efficiency) in liver; spleen; lungs; and brain after intravenous (IV), intranasal (IN), Per os (PO), and intratracheal (IT) administration is set forth in FIGS. 10A-D. Because the amount of MEVs (100 μl) administered was too much, the distribution following intranasal administration is not an accurate reflection of the MEV pathway upon intranasal administration. Subsequent experiments employed 20 μl, and the results show that MEVs, upon intranasal administration, traffic to the brain. This is shown and described in Examples below.

### Intravenous Administration

[0770] Organs targeted by unmodified MEVs-liver and spleen
[0771] PK parameters:
   [0772] Peak/plateau time: 2-24 h (liver), 4-24 h (spleen)
   [0773] at t=day 3 compared to peak/plateau approximately 62% (liver), approx. 61% (spleen)
[0774] Longer presence or duration compared to mammalian EVs (see, e.g., Kang et al., Biodistribution of extracellular vesicles following administration into animals: A systematic review. J Extracell Vesicles. 2021; 10: e12085. (doi.org/10.1002/jev2.12085)).
[0775] No visible signs of toxicity
   Per os (oral) administration
[0776] Organs targeted by following oral administration: intestine and spleen
[0777] Oral availability:
   [0778] MEVs are orally available; they resist the passage through the stomach, reach the intestine and subsequently appear in the spleen.
   [0779] Mammalian EVs are not orally available, with the exception of bovine milk EVs.
[0780] PK parameters:
   [0781] Peak/plateau time: 1-6 h (intestine), 1-10 h (spleen)
   [0782] % at t=10 h compared to peak/plateau: approx. 33% (intestine), approx. 44% (spleen)
   [0783] % at t=48 h compared to peak/plateau: 0% (intestine), 0% (spleen)
[0784] No visible signs of toxicity
   Distribution in organs following intravenous and oral administration.

[0785] Liver: Following intravenous administration, the liver is the primary target organ. Following oral administration, the liver is marginally targeted, if at all.

[0786] Spleen: The pharmacokinetics profile depends on whether administration is intravenous or oral (per os). Intravenous administration is longer lasting. At day 3, 50-70% of the peak is still remaining. Oral administration is shorter lasting; at 48 hours, 0% remains.

### Intranasal Administration

[0787] Organs targeted by the unmodified MEVs appeared to include the lungs, but as demonstrated in Examples below, intranasal administration targets the brain. The volume administered in this experiment was too large and may have been inhaled or directed into the lungs upon administration. Subsequent results and experiment show that intranasal administration results in administration to the brain.
[0788] Preliminary PK parameters:
   [0789] Peak/plateau time: 4-28 h
   [0790] % at t-day 3 compared to peak/plateau: 70-80%
[0791] No visible signs of toxicity
   Intratracheal administration
[0792] Organs targeted by the MEVs are the lungs
[0793] PK parameters:
   [0794] Peak/plateau time: 2-72 h
   [0795] % at t=day 3 compared to peak/plateau: approx. 80%
[0796] No visible signs of toxicity

### Example 10B

In Vivo Biodistribution of Mevs after Per Os (Po) Administration

### a. MEV Labelling Using pKH26 Fluorescent

[0797] PKH26 is a lipophilic fluorescent dye used for general membrane labeling. It is used for in vitro studies, as well as long term in vivo experiments due to enhanced stability (in vivo half-life is over 100 days). MEVs were labeled with PKH26 as described above and administered orally to BALB/c mice at a dose of 4×10exp10 MEV particles per animal. Between 0.5 to 24 hours post-administration, the animals were sacrificed, and the intestine (epithelium and GALT), the spleen and the liver were harvested.

### b. Organ Sampling and Processing

[0798] The jejunum and ileum were gently rinsed with a cold PBS solution. Then, a piece of approximately 0.5 to 1 cm of jejunum and ileum were snap-frozen and lastly, each piece was longitudinally placed on bottom of the cryomold for OCT inclusion (as described below).

[0799] The spleen was snap-frozen, then, the spleen longitudinally plated on bottom of the cryomold for OCT inclusion.

[0800] The medial and the left lobes of the liver were cut in two sections of maximum 0.5 cm high. Then, each section was snap-frozen, then plated the cut face on the bottom of the cryomold for OCT inclusion.

### c. Snap-Frozen

[0801] A small stainless-steel bowl was placed in the bottom of a container containing dry ice in pellet form and liquid nitrogen. Then, isopentane/2-methylbutane was slowly added in the container. When the dry ice pellets stop bubbling vigorously or/and the isopentane start to become opaque, the isopentane/2-methylbutane is at optimal temperature. Organs were gently immerged in isopentane/2-methylbutane and then placed in cassette (one cassette with each section of liver, the spleen and the piece of jejunum and one cassette with the piece of ileum only). Then, cassettes were stored at ≤−75° C. until OCT inclusion.

### d. OCT Inclusion Protocol

[0802] A small stainless-steel bowl was placed in the bottom of a container containing dry ice in pellet form and liquid nitrogen. Some pellets of dry ice were also placed directly in the bowl. Then, isopentane/2-methylbutane was slowly added in the container. When the dry ice pellets stop bubbling vigorously and/or the isopentane starts to become opaque, the isopentane/2-methylbutane is at optimal temperature. The frozen tissue samples were then placed and oriented as mentioned above for each organ in the cryomold. The tissues were gently pushed with forceps to ensure that the bottom of surface of the tissue is placed properly (touching the face of the bottom, center in the mold and properly oriented). The cryomold with frozen tissue samples were placed on the surface of the cold isopentane/2-methylbutane. Optimal cutting temperature compound (OCT compound) was carefully deposited onto the specimen until it is completely covered. After hardening of the OCT compound (between 30 seconds and 1 minute), the OCT embedded block was placed in a bag (such as zip freezer bag). The frozen blocks were temporarily stored in dry ice. Then, slices of 5 μm were performed with a cryostat then glued on untreated slides for the histology and on treated slides for the immunochemistry.

### e. HES Staining

[0803] The HES staining allowed the observation of the morphology and the structure of tissues. After fixation in acetone, sections were immersed successively in solutions of Harris hematoxylin, eosin and saffron. After dehydration, sections were mounted between slide and cover slip using Entellan™ mounting medium. Cytoplasm appeared in pink and nuclei in violet blue. Extracellular matrix was stained in yellow to pink.

### f. PKH26 Dye

[0804] Accumulation of fluorescent labeled MEVs was visualized by a LSM700 laser scanning confocal microscope (from Zeiss) and images were processed with LSM Image Browser. DAPI (4′,6-diamidino-2-phenylindole) [Invitrogen, Ref. S36938] was used as nuclear counterstain prior to the imaging. Sections were mounted with aqueous medium with DAPI for fluorescent slide scanner observation (maximum 10 days after collection).

[0805] FIG. 32A-E shows a microscopic image of mouse intestinal epithelium 8 hours after PKH26-labeled MEV administration. Fluorescent signal visible in the enterocytes confirms MEV internalization. Cell nuclei were stained with DAPI.

### G. CONCLUSIONS

[0806] When MEVs are orally administrated to the mice, they follow through the digestive tract. MEVs first reach the stomach, where they resist the stringent conditions of the gastric juice. In about 30 minutes after administration, they reach the intestine, where they stay for several hours.

[0807] Once in the lumen of the intestine, as shown in this Example, MEVs are internalized by the cells of the intestinal epithelium, or enterocytes. MEVs also pass through the epithelial layer into the GALT. The GALT is a lymphoid structure associated to the digestive tract (gut-associated lymphoid tissues) located beneath the intestinal epithelium. It is located at specific spots along the intestine. GALT is a dense tissue composed of germinal centers with B and T lymphocytes, plasmocytes and innate immune cells including dendritic cells and macrophages. In the intestine, fluorescence is observed mostly in the GALT. Fluorescence appears concentrated in discrete spots around nucleus meaning that MEVs are localized in the plasma of cells occupying all the space in the plasma. This allows revealing of the shape of cells. Cells with MEVs inside correspond to histocytes (resident macrophages) or dendritic cells respectively and are located mainly at the periphery of GALT and in the center of the GALT. Representative images are displayed in FIGS. 32A-D. No visible MEVs appear in the liver at all times evaluated (30 min to 24 h). A few hours after administration, dendritic/macrophage cells with MEVs inside move from the GALT to the spleen and stay in the spleen for several hours. MEVs reach principally the red pulp (blood cells and some Th and B cells) and to a lesser extent the white pulp of the spleen (lymphoid cells) (see FIG. 32D).

[0808] In the spleen, fluorescence is visible in several areas corresponding to the white and to the red pulps. The intensity of the fluorescence decreases in a gradient from the red pulps to the white pulps. Fluorescence is detected in spots inside the cell's cytoplasm. Cells with MEVs inside are round or reticular and have similar size; they may respectively be histocytes and dendritic cells or macrophages.

[0809] Cells can move from the GALT into the bloodstream directly or they can join it after they have first passed through the lymphstream. GALT cells carrying MEVs inside eventually arrived at the liver by the portal vein, MEVs, however, are ‘invisible’ to the liver as they have been internalized by GALT cells that naturally transport them to the spleen (see FIG. 32E). These MEVS, therefore, are not captured by the liver, as are the MEVs that have been administered intravenously.

### Example 11

### In Vitro Delivery of Cargo by the Microalgae Extracellular Vesicles (MEVs) in Primary and Established Cell Lines

### A. Cell culture

[0810] Human primary cells (primary hepatocytes from healthy volunteers or patients) or established hepatocytes cell lines (HepG2 and Huh7) or established lung cell lines (A459 and BEAS-2B) are cultured in specific optimal conditions for each type of cells. The cells are grown in 75 cm² flasks, incubated at 37° C. with 100% humidity and 5% CO₂. The culture medium is changed every 2 days to ensure the growth of cells and to avoid contamination. Once reached sub-confluence, the cells are detached from the bottom of the flask with trypsin (0.25%), centrifuged (1600 g, 4 min), re-suspended in fresh culture medium and seeded at 2×10⁵ cells/plate.

### B. Delivery and Expression of the GFP Protein Loaded in MEVs in Human Cells

### 1. Effect on Primary Human Hepatocytes PHH and on Established Hepatocyte Cell Lines Viability

[0811] PHHs and hepatocyte cell lines (1×10⁵ cells/mL) are seeded into a 96-well plate and allowed to attach overnight. Then, the cells are exposed to different cargo loaded MEV formulations or empty MEVs for four hours. Following the incubation, 20 μL of MTT tetrazolium dye solution (5 mg/mL) is added into each well. After 3 hours of incubation at 37° C., the MTT-containing medium is removed and 100 μL DMSO is added into each well to dissolve the purple formazan precipitate. Absorbance is measured at 570 nm using a SpectraMax® microplate reader (Molecular Devices, USA) and cell viability is expressed as a percentage of viable cells in the treated groups compared to the untreated control group.

### 2. MEV Internalization in PHH Established Hepatocyte Cell Lines

[0812] The internalization of the GFP-protein-cargo-loaded MEVs or GFP-mRNA-cargo-loaded MEVs in PHH or in hepatocyte cell lines is studied by confocal microscopy. Cells are seeded in 16-well chamber slides (Lab-Tek) at 1×10⁵ cells/mL. After 24 h, cells are incubated with the MEVs for 24 h and 48 h and subsequently washed with PBS, washed again with acid wash buffer (0.5 M NaCl, 0.2 mM acetic acid) to remove membrane bound MEVs and once more with PBS. Cells are fixed with 4% paraformaldehyde in PBS at room temperature for 20 min. Slides are then washed with PBS and mounted using Fluorsave (Calbiochem). Confocal fluorescent imaging is performed using a LSM700 laser scanning confocal microscope (Zeiss) and images are processed with LSM Image Browser. Results are shown in FIGS. 37 and 38.

### C. MEV-Mediated Delivery and Expression of GFP mRNA in Human Hepatocyte Cells

### 1. mRNA Translation Studies

[0813] The delivery and biological activity in hepatocytes of the GFP-mRNA-cargo-loaded MEVs is determined by total RNA extracted from the cells using the RNeasy Minikit (Qiagen) according to the manufacturer's instructions. Then, 500 ng of total RNA is reverse transcribed into cDNA using a reverse transcriptase (Promega) and real-time PCR is performed using the LightCycler 480 SYBR Green I Master Kit on an LC480 device (both from Roche Diagnostics). The mRNA level is calculated by normalizing the threshold cycle (CT) of target genes to the CT of the 28S ribosomal RNA housekeeping gene. The primers are designed using primer software from Roche Diagnostics and are purchased from Eurogentec.

### 2. Protein Expression Studies

[0814] The delivery and biological activity in hepatocytes of the GFP-protein-cargo-loaded MEVs is determined by SDS-PAGE followed by Western blot analysis. Cells are lysed on ice in RIPA buffer supplemented with β-mercaptoethanol (Sigma-Aldrich). Then, 30 μg of proteins are boiled and subjected to SDS-PAGE and transferred to nitrocellulose membranes (Bio-Rad). The blots are blocked with Tris buffered saline (TBS), 0.1% Tween-20 containing 5% BSA and incubated overnight at 4° C. with the following antibodies. Subsequently, the blots are incubated with the relevant HRP-conjugated secondary antibody for 1 h at room temperature. Signals are revealed by chemiluminescence (Thermo Fisher Scientific).

### D. MEV-Mediated Delivery and Expression in Normal Human Keratinocytes (NHEK) and in Primary Human Monocytes

### 1. Culture Condition

[0815] NHEK and culture medium (KGM-Gold Bullet kit) were purchased from Lonza. Peripheral Blood Mononuclear Cells (PBMC) from healthy volunteers were obtained from 1′Etablissement Français du Sang (EFS). Cell culture medium Macrophage-SFM (M-SFM) was purchased from Gibco.

[0816] PBMCs were obtained from healthy blood donor buffy coats by a standard Ficoll-Hypaque gradient method. Monocytes were isolated from PBMCs by adherence to plastic for 2 hours in serum-free medium (M-SFM) optimized for macrophage culture, at 37° C. in a humidified atmosphere containing 5% CO₂. NHEK were cultured in accord with manufacturer's recommendations (Lonza) and seeded in 96-well plates the day before the assay.

Cellular uptake of GFP-loaded MEVs

[0817] The experimental plan is shown in FIG. 35. GFP-MEVs are incubated with NHEK and monocytes in wells for 4 h, 8 h and 24 h incubation time and then washed with PBS twice. The plates were then placed in the Incucyte apparatus and images were done at 0, 6, 12, 24 and 48 h for Prot-GFP and 0, 12, 24, 48 and 72 h for mRNA-GFP.

[0818] Images are analyzed using the Incucyte software after a first quantification of the total number of cells per well. The software then quantified the number of cells that contained green objects in the control wells to determine the autofluorescence threshold level. This threshold is applied to all the images. Then the software calculated the percentage of cells that are green in the treated wells using the following ratio: Ratio=(cells containing green objects/number of cells)×1000

[0819] For human monocytes the optimal time of incubation with MEVs is 8 h with ratio of 5 percent of green cells, and for NHEK cells incubation times of 8 h and 24 h show results ratios of 10 and 20 percent of green cells, respectively. The timeline for image analysis is shown in FIG. 35.

### E. MEV-Mediated Delivery and Expression in Human Cancer Cell Lines (A375 (Melanoma), CAMA-1 (Breast Cancer), and HEK 293T (Embryonic Kidney)

### 1. Cell Culture

[0820] On the morning, cells are detached with Trypsin (0.05% Trypsin-EDTA (1X); Around 5 min), counted by an automatic cell count (Cellometer® Auto 1000), diluted to a concentration 1.6×10⁶ viable cells/mL. Then, 3 mL of the cell suspension are seeded into a six well plate. On the afternoon of the same day 25 μl of each tested MEVs RNAi against c-myc or k-ras are added on the wells and incubated for 24 h, 48 h, 72 h and 96 h at 37° C. After the indicated time, cells are washed two times with PBS. The cells quantity is split: one for protein extraction, and one for RNA extraction, and placed at −80° C.

### 2. RNA Extraction

[0821] Cell pellets are lysed by addition of 350 μL of RLT lysis buffer (99% RLT buffer+1%-mercaptoethanol). RNA is extracted using the RNAeasy mini kit using a protocol provided by the manufacturer.

### 3. Rt-Qpcr

[0822] RNA is dosed using a NanoDrop® One (Thermo scientific) and adjusted at 130 ng of RNA per reaction with a volume of water RNAse-free 0.1% DEPC to obtain a final volume of 5.9 μl. Then, 4.1 μl of mix (including SuperScript IV, dNTP mix, Random primers, 0.1 M DTT) are added and incubated at 37° C. for 1 h.

[0823] qPCR is realized using the Takyon® No ROX SYBR 2X MasterMix blue dTTP. For one reaction, primers are added at final concentration of 0.66 μM. Then, water qs 5 μL and 1.67 μl of cDNA, diluted at 1/20, are added. LC480 is used to realize the run. Each sample is run in triplicates. The primers used are described below:

c-myc forward primer:
(SEQ ID No. 404)
TACAACACCCGAGCAAGGAC
c-myc reverse primer:
(SEQ ID No. 405)
TTCTCCTCCTCGTCGCAGTA
k-ras forward primer:
(SEQ ID No. 406)
GGTTGCGCTGACCTAGGAAT
k-ras reverse primer:
(SEQ ID NO. 407)
TCCATTTCGGGGCAAACAGT

[0824] MEV-RNAi against k-ras is:
[0825] 1—ineffective for inhibiting k-ras mRNA amount in A375 melanoma cells,
[0826] 2—effective for inhibiting k-ras mRNA in HEK293T cells (33% at 24 h and 48 h),
[0827] 3—effective for inhibiting k-ras mRNA in CAMA-1 cells (55% at 24 h).

[0828] MEV-RNAi against c-myc is:
[0829] 1—effective for inhibiting c-myc mRNA in A375 melanoma cells (40% at 24 h),
[0830] 2—effective for inhibiting c-myc mRNA in HEK293T cells (30% at 24 h),
[0831] 3—effective for inhibiting c-myc mRNA in CAMA-1 cells (30% at 24 and 48 h).

### 4. Western-Blot

[0832] Proteins were extracted using RIPA lysis buffer. Then, after 1 h of incubation, they were centrifuged. The whole manipulation is realized on ice. The supernatant was recovered to be dosed.

[0833] Lysates were dosed using the Bradford protein assay and adjusted at 50 μg in each sample. Then, each sample was heated at 95° C. for 5 min, loaded on precast gels (Mini-PROTEAN®, BIO-RAD) to apply a PAGE-SDS. After the ending of electrophoresis, proteins were transferred using the iBlot®2 (from ThermoFisher) with a PVDF Mini Stacks.

[0834] C myc, K-ras and B actin (Control) were revealed with a primary antibody and with a near Infrared secondary antibody (references are described below). The near infrared signal was read with Azure 500® (azure biosystems).

MEV-RNAi against k-ras and c-myc are:
[0835] 1—effective to inhibit k-ras protein in HEK293T cells (90% at 24 h and 50% at 48 h)
[0836] 2—effective to inhibit c-myc protein in HEK293T cells (40% at 24 h and 30% at 48 h)

### 5. Cytotoxicity Assay

### a. Cells and Treatment with MEVs-RNAi

[0837] All cell lines are detached with Trypsin, counted (Cellometer Auto 1000) with Trypan blue solution (Sigma T81154, 0.4%). Viable cells are seeded in 96-well plates at 30000 cells per well in 100 μL per well.

[0838] Cells are treated 24 h after seeding. Compounds are directly added in each well containing 180 μL of complete medium. 20 μL of are added in: ten-fold serial dilutions for a total of 5 dilutions. For the mock, PBS was added in each well.

### a. MTT Assay

[0839] After 72 hours of MEV exposure, 20 μl of MTT at 5 mg/mL are added to each well and incubate for 2 hours at 37° C.

[0840] The supernatant is gently aspirated, without aspirating or disturbing the crystals.

[0841] Then, 100 μl of isopropanol-HCl IN were added to each well (900 ml of isopropanol+100 ml of HCl diluted to 1/10). The plate is incubated for 15 minutes and homogenized with multichannel pipette. The plate is read to the luminometer (OD 540 nm-OD 690 nm) and the absorbances are analyzed taking into account of blanks (medium and dissolution MTT solution).

[0842] On these cell lines after 72 h of MEV-RNAi exposure, none of tested conditions showed a significant decrease of viability.

### Example 12

[0843] Distribution of MEVs in the bulbar region, in the hypothalamic region and in the cerebellar region of the brain following intranasal administration.

[0844] A. MEVs produced, purified, characterized, and labelled with DiR as described herein (see, also copending International PCT application No. PCT/EP2022/070371, published Jan. 26, 2023) were administered in C57BL/6 mice by intranasal administration. Mice were euthanatized at 16 h after single intranasal administration (20 mL in each nostril) per animal; the brains were carefully isolated; brains were sectioned, embedded in OCT at max. 30 min post sampling and sliced at different distance of the bregma.

[0845] B. 8-week-old Swiss mice were treated by IN administration with up to 20 μl of a MEV suspension. 16 hours after, mice were rapidly anesthetized, perfused with 4% (weight/vol.) paraformaldehyde antigen fix solution (PFA). The brains were taken out from the skull with a special care not to damage the olfactory bulbs, post-fixed in 4% PFA and soaked in 30% sucrose.

[0846] C. Fluorescently labeled (DiR) MEVs were detected in the brain by histological examination. Briefly, the brains were cut using a cryostat into free-floating 20-μm coronal sections. Slices were selected in the bulbar region, in the hypothalamic region and in the cerebellar region. The sections were mounted on microscopic slides and analyzed for fluorescence as follows:

[0847] DNA was stained with DAPI to visualize the brain tissue by labeling the nuclei of all the cells. MEVs were labelled prior to the study with DiR as described previously and visualized as described in Examples 1 and 2. Positive control slides were prepared using an MEV suspension. The transport of MEVs into the brain was evaluated based on the level of fluorescently labeled MEVs in the analyzed areas of the brain: olfactory bulb, hypothalamus, and cerebellum.

[0848] D. Results obtained allowed to identify DiR staining inside the brain of mice after IN administration of DiR stained MEVs. The DiR staining can be detected in different brain regions all along the analyzed part of the brain from Bregma 4 mm to Bregma-1.5 mm, such as the olfactory bulbs, the corpus callosum, the cortex and the internal capsule, the thalamus and at different levels of the hippocampus (fimbria and close to dentate gyrus).

### Example 13

### MEV-Mediated In Vivo Delivery, Expression and Biologic Activity of Luciferase Enzyme and Luciferase-mRNA

### A. Intra-Tracheal Administration of MEVs Loaded with Luciferase mRNA or Luciferase Protein

[0849] In vivo bioluminescence was used to study the biodistribution and MEV-mediated delivery and expression of luciferase mRNA and luciferase protein. Eight (8) female BALB/cByJ mice were divided into two groups (4 animals per group) for intra-tracheal (IT) administration. Mice in each group were treated either with MEVs loaded with mRNA encoding luciferase (MEV-luc mRNA) or MEVs loaded with luciferase enzyme (MEV-luc protein). MEVs were loaded and characterized as described above. For the IT administration, the animals were maintained under isoflurane-induced anesthesia and placed on a mouse intubation platform. Then, the trachea was backlit with a cold light and 50 μL/mouse of MEV formulations were administered intra-tracheally using a Microsprayer® aerosolizer (Penn-Century). After administration, mice were maintained in the same position on the intubating platform for at least 30 s before being replaced in their cage. A background mouse also was included in the study; this mouse did not receive any MEV administration and served as a control to measure the background level of the bioluminescence acquisition.

### B. Bioluminescence Acquisition

[0850] Prior to imaging, the fur of each animal was shaved on the abdomen and thoracic area using an electric clipper. Each mouse was intraperitoneally (IP) injected with 200 μL of luciferin solution at a concentration of 16.5 mg/mL. Bioluminescence acquisitions were performed 10 minutes after the luciferin injection, with mice anesthetized with a mix of isoflurane/oxygen. Animals were positioned in dorsal recumbency (ventral images) to visualize the mice abdomen and thorax and particularly the lungs, liver, intestine, and spleen. Bioluminescence acquisition in vivo was performed with the IVIS® LUMINA X5 optical imaging system (PerkinElmer). The bioluminescence was measured at 6 timepoints: 1 h before MEV administration and 6, 30, 48, 54 and 72 h post-administration. The bioluminescence signal was visualized and quantified in the lungs, liver, intestine, and spleen. Animals were euthanized after the last bioluminescence acquisition. At each timepoint, bioluminescence acquisitions were first performed on the background mouse to measure the background flux level corresponding to the auto-bioluminescence of mice and the noise emitted by the camera of the optical imaging system. Bioluminescence acquisitions then were performed on the experimental mice.

### C. Delivery of Luciferase mRNA, Protein Expression and Luciferase Activity In Vivo

[0851] FIG. 33 shows whole-body bioluminescence imaging of a representative animal treated with MEVs loaded with luciferase mRNA. MEV-mediated delivery of mRNA resulted in expression of enzymatically active luciferase in mouse tissues, as evidenced by the luminescence signal detected after the administration of luciferin. The target organs after intratracheal administration include the respiratory system (lungs and naso-buccal epithelium), as well as the gastrointestinal tract (intestinal epithelium) resulting from partial regurgitation of the MEV formulation. Luciferase activity after a single administration of MEVs was detectable starting from 6 hours post-administration and lasted for 2-3 days. The control was a background mouse with no MEV administration.

### D. Luciferase Delivery and Activity In Vivo

[0852] FIG. 34 depicts whole-body bioluminescence imaging of a representative animal treated with MEVs loaded with luciferase enzyme. MEV-mediated delivery of the protein resulted in enzymatic activity of luciferase in mouse tissues, as evidenced by the luminescence signal detected after the administration of luciferin. The target organs after intratracheal administration include the respiratory system (lungs and naso-buccal epithelium), as well as the gastrointestinal tract (intestinal epithelium) resulting from partial regurgitation of the MEV formulation. Luciferase activity after a single administration of MEVs was detectable starting from 6 hours post-administration and lasted for 3-4 days. The control is a background mouse with no MEV administration.

### Example 14

In vitro-Internalization of MEVs by human iPSC-derived neural cells and expression of payload (mRNA, or protein or small molecules).

[0853] MEVs can load a wide variety of cargo, such as siRNAs, mRNAs, small molecules, peptides, and proteins. To evaluate MEVs as a delivery system for therapeutic purposes to the central nervous system, the internalization of GFP-loaded MEVs by human brain cells derived from induced pluripotent stem cells was assessed. Human neural stem cells, astrocytes, glial cells and neurons, validated with cell type-specific markers, were used for the internalization assays.
[0854] A. MEVs were produced, loaded, and characterized as described above.
[0855] B. Culture, differentiation, and characterization of derived cells from human induced pluripotent stem cells (hiPSCs).

[0856] Human induced pluripotent stem cells (hiPSCs) are cultured under a neural induction medium to generate neural stem cells (NSCs) according to the protocol described in Yan et al. (2013) NeuroImage 80:246-262. NSCs are expanded in NEM medium (Advanced DMEM/F12 and Neurobasal supplemented with Neural Induction Supplement). NSCs exhibit neural progenitor markers and are negative for pluripotency markers, indicating a commitment to the ectodermal lineage. During brain development, NSCs are capable to give rise to all neural cells (neurons, astrocytes, and oligodendrocytes) and have the capacity for self-renewal. In adulthood, NSCs persist in the hippocampus and in the subventricular zone (SVZ) of the lateral ventricles. These are the most studied regions capable to generate new neural cells and to contribute to neural plasticity. Human neural stem cells exhibited positive staining for Nestin and PAX6, both neural stem cell markers. No OCT4 positive cells were detected in NSCs, which is a pluripotency marker highly expressed in hiPSCs (Casas et al, 2018).

[0857] To generate astrocytes, NSCs are cultured under astrocyte differentiation medium (DMEM/F12 supplemented with N₂ and 1% fetal bovine serum) for 21 days according to the protocol described in Yan Y et al., 2013. After the differentiation stage, astrocytes are cultured for 5 weeks under astrocyte medium (DMEM/F12 10% fetal bovine serum) to ensure cell maturation. Mature astrocytes were previously characterized (Ledur et al., 2020 and Trindade et al., 2020) by the expression of main astrocytic markers (as ALDHIL1, GFAP, Vimentin, EAAT1, EAAT2, and S100b) and exhibit functional characteristics (as Human iPSC-derived astrocytes display impairment of [3H]D-aspartate uptake after TNF-α exposure. [3H]D-aspartate is a nonmetabolized analog of glutamate that is commonly used to measure the uptake activity of glutamate transporters and evaluate astrocyte functionality); Ledur et al., 2020 and Trindade et al., 2020, respectively.

[0858] NSCs are differentiated in mixed neuronal culture on laminin-coated plates and under neuronal differentiation medium (Neurobasal supplemented with 1X B27, 1X Glutamax, 1X Non-Essential Amino Acids Solution, and 200 nM ascorbic acid) (Yan Y et al., 2013). On day 7 and 14 of the differentiation protocol, cultures are detached with Accutase® and replated in laminin-coated coverslips in neuronal differentiation media containing 10 μM ROCK inhibitor to improve neuronal survival.

[0859] Neurons are cultured until day 45 to perform experiments and ensure proper maturation. The characterization uses neuronal markers, such as b-tubulin III (BTUBIII), microtubule-associated protein 2 (MAP2), and presynaptic marker synaptophysin (SYP). Neurons are negative to Nestin, a neural stem cell marker, indicating the mature profile of the culture.

[0860] C. Culture and characterization of glial cells.

[0861] Primary human glial cells, obtained from Lonza, were isolated. The human glial cells were seeded at a density of 36,000 cells/cm² and cultured in DMEM supplemented with 10% FBS, 2 mmol/l GlutaMAX, 1 mmol/l sodium pyruvate, 100 units/ml penicillin, and 100 μg/ml streptomycin for one week. Glial cells were characterized using specific markers as glial fibrillary acidic protein (GFPA) and S100b, Vimentin and Nestin.

[0862] D. Evaluation of the internalization of MEVs in human neuron stem cells, human neurons, human astrocytes and human glial cells.

[0863] Cells were incubated with MEVs-mRNA eGFP or GFP (protein) and monitored for up to 24 h for vesicle internalization using a live-cell imaging platform. Hoechst dye is used to stain nuclei. After image acquisition, GFP intensity is measured to estimate the internalization efficiency and the percentage of GFP positive cells is calculated.

[0864] E. Internalization, delivery, and analysis of MEVs loaded with mRNA-eGFP or GFP protein to human neural stem cells.

[0865] Human NSCs were incubated with MEV-GFP for up to 24 h. Cells were analyzed on a live-cell imaging platform after 30 min of Hoechst incubation for nuclei staining. After image acquisition, GFP intensity was measured and GFP positive cells were calculated. Cells were immuno-stained for PAX6 for representative imaging of each cell type. Calculations made: Mean intensity GFP values and percentage of GFP positive cells.

[0866] F. Internalization, delivery, and analysis of MEVs loaded with mRNA-eGFP or GFP protein to human astrocytes.

[0867] Human astrocytes were incubated with MEV-GFP for up to 24 h. Cells were analyzed on a live-cell imaging platform after 30 min of Hoechst incubation for nuclei staining. After image acquisition, GFP intensity was measured and GFP positive cells were calculated. Cells were immuno-stained for GFAP for representative imaging of each cell type. Calculations made: Mean intensity GFP values and percentage of GFP positive cells.

[0868] G. Internalization, delivery, and analysis of MEVs loaded with mRNA-eGFP or GFP protein to human neurons.

[0869] Human neurons were incubated with MEV-GFP for up to 24 h. Cells were analyzed on a live-cell imaging platform after 30 min of Hoechst incubation for nuclei staining. After image acquisition, GFP intensity was measured and GFP positive cells were calculated. Cells were immuno-stained for MAP2 for representative imaging of each cell type. Calculations made: Mean intensity GFP values and percentage of GFP positive cells.

[0870] H. Internalization, delivery, and analysis of MEVs loaded with mRNA-eGFP or GFP protein to human microglia cells: human glial cells were incubated with MEV-GFP for up to 24 h. Cells were analyzed on a live-cell imaging platform after 30 min of Hoechst incubation for nuclei staining. After image acquisition, GFP intensity was measured and GFP positive cells were calculated. Cells were immuno-stained for GFAP for representative imaging of each cell type. Calculations made: Mean intensity GFP values and percentage of GFP positive cells.

### Example 15

In Vivo Delivery and Expression of Exogenously Loaded mRNA-Ocular Distribution Following a Single Ocular Topical Administration in Albino Rabbits

[0871] A New Zealand White (albino) rabbit is one of the species most used for ocular biodistribution analysis. Eight 3-month males of weight between 2-2.5 kg were used in the ocular topical administration study. All animals were ear-tagged at their arrival and the identification numbers 10 were also marked in ears using indelible ink following the inclusion examination. Animals were daily observed for signs of illness and particular attention was paid to their eyes. Only healthy animals without visible ocular defect were used in the study. Animals were housed individually in standard cages. The temperature was held at 18+/−3° C. and the relative humidity at 45-80%. Rooms were continuously ventilated (15-20 air volumes per hour). Animals were routinely exposed (in-cage) to 10-200 1x light in a 12-hour light (from 7:00 a.m. to 7:00 p.m.) and darkness-controlled cycle. Animals had free access to food (90 g/day) and water available ad libitum from plastic bottles.

[0872] A 50-μL single instillation on both eyes was applicated to all animals, using an appropriate micropipette, at a dose of 2λ10⁸ MEVs loaded with mRNA-eGFP. Fluorophotometry was performed as follows: at several time-points (0, 6, 24, 30, 48, 54, and 72-hours post-administration) animals were anesthetized and pupils were dilated; measurements of ocular fluorescence were performed with FM-2 Fluorotron-Master ocular fluorophotometer in both eyes. A series of 148 scans with a step size of 0.25 mm were recorded from the cornea to the retina along the optical axis.

### CONCLUSIONS

[0873] The fluorescence signal in various ocular tissues (choroid/retina, vitreous, lens, anterior chamber, cornea) was obtained at data points that will be 0.25 mm apart along an optical axis by the fluorophotometer. Any detectable fluorescence was measured in the vitreous or the anterior chamber. The results of all animals are summarized in FIG. 39.

[0874] Since modifications will be apparent to those of skill in the art, it is intended that this invention be limited only by the scope of the appended claims.

1. A method of preparing microalgae extracellular vesicles (MEVs), comprising:
a) introducing nucleic acid into a microalgae cell, wherein:
the nucleic acid encodes the endogenous cargo, or encodes a biosynthesis pathway that produces the endogenous cargo;
the microalgae is a species of the family Chlorellaceae;
the nucleic acid encodes the endogenous cargo, or encodes a biosynthesis pathway that produces the endogenous cargo, wherein:
the endogenously loaded cargo is heterologous to the microalgae;
the endogenously loaded cargo is encodes a bioactive product or is a bioactive product; and
the endogenously loaded cargo comprises a polypeptide and/or RNA,
with the proviso that the RNA molecule does not comprise RNAi or precursors thereof;
b) culturing the microalgae cells, whereby the encoded cargo is packaged in the resulting MEVs; and
c) isolating the MEVs.

2. An MEV produced by the method of claim 1.

3. The method of claim 1, further comprising formulating the MEVs into a composition for administration to an animal.

4. A composition, comprising an MEV of claim 2, wherein the cargo comprises an immunomodulatory product or an immunizing antigen.

5. The composition of claim 4 that is formulated for oral administration.

6. The composition of claim 5, wherein the cargo comprises a vaccine against a pathogen.

7. The method of claim 1, wherein the endogenous cargo comprises mRNA, a peptide, or a polypeptide.

8. The method of claim 1, wherein the microalgae is a species of Chlorella.

9. The method of claim 1, wherein the microalgae is a species of Chlorella selected from among Chlorella ellipsoidea, Chlorella pyrenoidosa, Chlorella sorokiniana, Chlorella vulgaris, and Chlorella variabilis.

10. The method of claim 9, wherein the Chlorella is Chlorella vulgaris.

11. The method of claim 1, wherein the cargo is for treatment of a disease, disorder, or condition that is a proliferative disorder, or an immune cell disorder, or an infectious disease, or a genetic disease, or a metabolic disease.

12. The method of claim 11, wherein the disease, disorder, or condition is selected from among a disease of or involving one or more of:
the upper respiratory system, and/or the lower respiratory system, and/or respiratory system associated organs and tissues;
the central nervous system, and/or the peripheral nervous system, and/or central nervous system associated organs and tissues;
the skin, dermis, and/or epidermis, or a disease or condition of or involving the exposed epithelia or mucosa;
urogenital mucosa; naso-buccal mucosa; anorectal mucosa; ocular mucosa; or is an ophthalmic disease, disorder, or condition;
the immune system;
the eyes and/or a disease, disorder, or condition of the eyes selected from a macular degeneration, or cataracts, or glaucoma, or conditions resulting from diabetic retinopathy, or genetic diseases affecting the vision, the eyes, and/or associated tissues;
an infectious agent; and
lymphoid tissues, lymph nodes and/or the spleen.

13. The method of claim 12, wherein the disease, disorder, or condition involves lymphoid tissue wherein the lymphoid tissue is selected from among mucosa-associated lymphoid tissues (MALT), gut-associated lymphoid tissues (GALT), bronchus-associated lymphoid tissues (BALT), nasal-associated lymphoid tissues (NALT), conjunctival-associated lymphoid tissues (CALT), larynx-associated lymphoid tissues (LALT), skin-associated lymphoid tissues (SALT), vulval-vaginal-associated lymphoid tissues (VALT), and testis associated lymphoid tissues (TALT).

14. The method of claim 12, wherein the disease, disorder, or condition is a disease of or involving the digestive tract, and the associated organs and tissues.

15. The method of claim 12, wherein the disease, disorder, or condition involves an infectious agent is selected from among a bacterium, a virus, an oomycete, and fungus.

16. The method of claim 1, wherein the cargo comprises an immunostimulatory protein, or an antigen, or encodes an immunostimulatory protein or antigen, whereby the MEV, upon administration is immunostimulating, eliciting an innate or adaptive immune response.

17. The method of claim 1, wherein the endogenous cargo is for treatment, including prevention, of a disease, disorder or condition that is a neurodegenerative disease (such as Parkinson's, or Alzheimer's, or Huntington's, or Creutzfeldt-Jakob disease, or other neurodegenerative disease), or a cognitive disorder (such as dementia, or amnesia, or delirium, or other cognitive disorder), or a brain disorder (such as encephalitis, or seizures, or tumors, or other brain disorder), or a nervous system disorder (such as pain, or seizures, or infections, or other nervous system disorder), or a genetic disease (such as cystic fibrosis, thalassemia, sickle cell anemia, Huntington's Disease, Duchenne's muscular dystrophy, Tay-Sachs disease, or other genetic disease), or a multifactorial disease (such as diabetes, Chronic Obstructive Pulmonary Disease (COPD), or other multifactorial disease), or cancer (such as cancer of the breast, or ovaries, or bowel, or prostate, or skin, or other cancer), or high blood pressure, or high cholesterol, or schizophrenia, or bipolar disorder, or arthritis, or a metabolic disease (such as familial hypercholesterolemia, or Gaucher disease, or Hunter syndrome, or Krabbe disease, or maple syrup urine disease, or metachromatic leukodystrophy, or MELAS (mitochondrial encephalopathy, lactic acidosis, stroke-like episodes), or Niemann-Pick disease, or phenylketonuria (PKU), or porphyria, or Tay-Sachs disease, or Wilson's disease, or other metabolic disease), or a disease of the respiratory system (such as asthma, or Chronic Obstructive Pulmonary Disease (COPD), or chronic bronchitis, or emphysema, or lung cancer, or cystic fibrosis, or bronchiectasis, or pneumonia, or other disease of the respiratory system), or a disease of the digestive tract (such as irritable bowel syndrome (IBS), or inflammatory bowel disease (IBD), or gastroesophageal reflux disease (GERD), or celiac disease, or diverticulitis, or disease of the digestive tract), or a disease of the mucosa (such as Behçet's disease, or burning mouth syndrome, or oral lichen planus, or pemphigus and pemphigoid, or recurrent aphthous stomatitis, or Sjögren's syndrome, or genitourinary infections, or sinusitis, or nasal or sinus polyps, or smell and taste disorders, or allergy, or ocular mucous membrane pemphigoid, or other disease of the mucosa), or a disease of the muscular or neuromuscular tissues (such as amyotrophic lateral sclerosis (ALS), or Charcot-Marie-Tooth disease, or multiple sclerosis, or muscular dystrophy, or myasthenia gravis, or myopathy, or myositis, or peripheral neuropathy, or other muscular or neuromuscular disease), or a disease of the bones (such as cervical spondylosis, or osteoporosis, or metatarsalgia, or polymyalgia rheumatica, or bone cancer, or rheumatoid arthritis, or osteoarthritis, or other bone disease), or a disease of the endocrine tissue (such as acromegaly, or adrenal insufficiency, or Addison's disease, or Cushing's syndrome, or Graves' disease, or Hashimoto's disease, or Creutzfeldt-Jakob disease, or hyperthyroidism, or hypothyroidism, or multiple endocrine neoplasia, or polycystic ovary syndrome (PCOS), or primary hyperparathyroidism, or other disease of the endocrine tissue), or a disease of haemopoietic or lymphoid tissues (such as Fanconi anemia, or thrombocytopenia, or Diamond-Blackfan anemia, or Shwachman-Diamond syndrome, or chronic granulomatous disease, or Gaucher's disease, or myeloid malignancies including myeloproliferative neoplasms, myelodysplastic disorders, chronic myelomonocytic leukemia, acute myeloid leukemia (AML), or lymphoma, or Hodgkin's lymphoma, or Non-Hodgkin's lymphoma, or lymphadenitis, or lymphangitis, or lymphedema, or lymphocytosis).

18. The method of claim 1, comprising formulating the isolated MEVs for oral administration and the endogenously loaded cargo comprises an antigenic polypeptide from a bacterial or viral pathogen.

19. The method of claim 1, comprising formulating the MEVs for parenteral administration, systemic administration, local administration, oral administration, topical administration, mucosal administration, enteral administration, or transdermal administration.

20. The method of claim 1, wherein comprising formulating the MEVs for oral administration as a vaccine.

21. A composition, comprising a microalgae extracellular vesicle (MEV) produced by genetically-modified microalgae, wherein:
the microalgae that produces the MEV is a species of Chlorellaceae;
the MEV comprise the cargo that was endogenously loaded into the MEV by the genetically-modified microalgae cells that produced the MEV; and
the cargo is heterologous to the microalgae, with the proviso that the cargo is not RNAi.

22. The composition of claim 21, wherein the Chlorella is selected from among Chlorella ellipsoidea, Chlorella pyrenoidosa, Chlorella sorokiniana, Chlorella vulgaris, and Chlorella variabilis.

23. The composition of claim 22, wherein the Chlorella is Chlorella vulgaris.

24. The composition of claim 21, wherein the cargo comprises a nucleic acid or protein or a nucleic acid encoding a protein that is a therapeutic product for treatment of cancer, or an infectious disease, or metabolic diseases, or a neurodegenerative disease or other CNS disorder, or aging, or an aging associated disease, or genetic diseases, or ophthalmic disorders, or immunological disorders, or involving internal organs urogenital organs, the cardiovascular system and associated organs and tissues, hematopoietic or lymphoid tissues, sensory organs and tissues, urogenital organs and tissues, muscle tissues, bones, and/or endocrine tissues.

25. The composition of claim 21, wherein the disease, disorder, or condition involves internal organs that comprise the liver, pancreas, spleen, or brain.

26. The composition of claim 21 that is formulated for oral administration, parenteral administration, topical administration, local administration, intratumoral administration, systemic administration, mucosal administration, intravenous administration, subcutaneous administration, intramuscular administration, intraperitoneal administration, transdermal administration, intranasal administration, inhalation, or intratracheal administration.

27. The composition of claim 21, wherein the composition is formulated for oral delivery, or is formulated as an aerosol for intranasal delivery, inhalation, or nebulization.

28. A method of treatment, comprising administering a composition of claim 21, wherein the formulation is selected to target the organ or tissue to be treated.

29. A composition comprising an MEV produced by the method of claim 1, wherein:
the composition is formulated for oral administration; and
the cargo comprises an immunomodulatory product or an immunizing antigen.

30. The composition of claim 29, wherein antigen is a viral or bacterial antigen.

31. A method of immunization, comprising orally administering the composition of claim 30.

The application's sequence listing, which the Patent Office published only in electronic form, follows.

SEQUENCE LISTING (407 sequences)

SEQ ID NO: 1 - protein, 459 aa, Homo sapiens
  REGION 1..459: note = Peptidyl-prolyl cis-trans isomerase FKBP4 (full sequence)
MTAEEMKATESGAQSAPLPMEGVDISPKQDEGVLKVIKREGTGTEMPMIGDRVFVHYTGWLLDGTKFDSSLDRKDKFSFDLGKGEVIKAWDIAIATMKVGEVCHITCKPEYAYGSAGSPPKIPPNATLVFEVELFEFKGEDLTEEEDGGIIRRIQTRGEGYAKPNEGAIVEVALEGYYKDKLFDQRELRFEIGEGENLDLPYGLERAIQRMEKGEHSIVYLKPSYAFGSVGKEKFQIPPNAELKYELHLKSFEKAKESWEMNSEEKLEQSTIVKERGTVYFKEGKYKQALLQYKKIVSWLEYESSFSNEEAQKAQALRLASHLNLAMCHLKLQAFSAAIESCNKALELDSNNEKGLFRRGEAHLAVNDFELARADFQKVLQLYPNNKAAKTQLAVCQQRIRRQLAREKKLYANMFERLAEEENKAKAEASSGDHPTDTEMKEEQKSNTAGSQSQVETEA

SEQ ID NO: 2 - protein, 140 aa, Homo sapiens
  REGION 1..140: note = Peptidyl-prolyl cis-trans isomerase FKBP4 tetratricopeptide repeat (TPR) domain 260-400
MNSEEKLEQSTIVKERGTVYFKEGKYKQALLQYKKIVSWLEYESSFSNEEAQKAQALRLASHLNLAMCHLKLQAFSAAIESCNKALELDSNNEKGLFRRGEAHLAVNDFELARADFQKVLQLYPNNKAAKTQLAVCQQRI

SEQ ID NO: 3 - DNA, 30954 bp, Homo sapiens
  misc_feature 1..30954: note = Gamma-aminobutyric acid type B receptor subunit 1
  source 1..30954: mol_type = genomic DNA
ctctcttccccccgccctgccttcccttgcaccctccttcttccctccgcccgggagctctccctggtccccggcgccgcctccttccctcccggctccccgctccccgctcccgtggctgccgccgccccggggaagaagagacaggggtggggtttgggggaagcgagagaggaggggagagaccctggccaggctggagcctggattcgaggggaggagggacgggaggaggagaaaggtggaggagaagggaggggggagcggggaggagcggccgggcctggggccttgaggcccggggagagccggggagccgggcccgcgcgccgaggtaagagccagggccccgggttagcagggctcggagagggggcgcgcggcgtggtgggggagggggcagtgggcgcagggcccagctgggggaagcggggctgggggagaggaggaaccgcggggatggaatcggggagcgctgaggcggccgatgccgggagcgtgggtaagccaggcttctgcgagccgcgggggccgggggagaggaggtggtgagaggtggagtcccgggagggttgggggccgagggaggcaggaggagggtggggacaggctttctctcctcctctccccccaccccgcgcggggctccgcccccgcctcctccgcggggcgctctcttggtccccaggctgagcccggtcggagcctgcgaggcaaccggcaagaggtcgagtagtctccgggtgcgggccgcgccggcggggctcggtccagtcctcatggccgcctctcacttagatgttgctgctgctgctactggcgccactcttcctccgccccccgggcgcgggcggggcgcagacccccaacgccacctcagaaggtgcatccttcttcgacgacctccggccctccttcgctccacttccctttccctgcatctcctcatttctggtcctcatcactatcccatcagtcccacatatcatcccggtctggcaaccccttctgctcggcccgactttactactgctgacctccttctgtcaccccacgttactatccagcacctcttttctctgcccacattgctacactataccaccttcctgtgcattttctccgcctcaatcccctttcccagccccacattactacctcaattactcccttttcttggtcccactttgctgtccagatgatcttattagcctccctttatcctcctatcctaattcaactcgaatatcctcatttagcctttttttttaaagaaaagctccacccacatatcatacccttcatgatttcttaattacttttctttcttacctccacccagcacccttccctccccacttgtgggttctctcatcagctttaaccctggccctttactctctgtcctttagccaggggatctgtacctgtccccactcccaccctctagtgccccatccctcttcctctgtccccagcctgcccacagaccacgccctactctccccttcctcccactggggagcctgccttttcctctttcccaccattcctctctgtatgcctccccgactcaccccttaggttgccagatcatacacccgccctgggaagggggcatcaggtaccggggcctgactcgggaccaggtgaaggctatcaacttcctgccagtggactatgagattgagtatgtgtgccggggggagcgcgaggtggtggggcccaaggtccgcaagtgcctggccaacggctcctggacagatatggacacacccagccgctgtggtgagtagcctcggaagcccctcccctcttcaagactattccttttcctgccgcaaacttagcattactgcttgcaagtcagcactttaaatccagtataccaaaattcacaaatacatttattgaatgactactacataagagcaattttgctctgtgcggttggaggtagtagagctagcagcctgcacagttcatttcatcctcccttcattaggccactgatcattggcctataacattgataattcatcttgtcagttattctctttgaggatcattagtggcagatgatgacaaaaaaattctaaaatgatttcatcacatttttgaatacctctgtcaccaacccagagaccatatgcccaagaaacaaaagccagtttaatattaatagaagccaactataataagaaaagcaaatctgattgtgcatccaaagttatatacatctacatatttcaaagccagagaaccgcccactgtagctgactttgaagagatcccattttgtgtgcttatagccccatcttgggttcctaaaatggtaattttttttttcttttgggaatgtgtggatgcttgcacaggtaagggaggattggaagataggtaggcaaatccttttcacatgtgattttctttagagcaggatgcttgtggacccaaacctgcacctgagtcccctgctctttaaagggaaagagccttcttcaactcgcctctcttcttattttcctatctctccacagtccgaatctgctccaagtcttatttgaccctggaaaatgggaaggttttcctgacgggtggggacctcccagctctggacggagcccgggtggatttccggtgtgaccccgacttccatctggtgggcagctcccggagcatctgtagtcagggccagtggagcacccccaagccccactgccagggtgaggggaacagctgcctgcatgcagctgatgaggacgcttgtgtgaggatgggagtggggtgggaatggataatgggaaagaatggagagctataaaaatgtgggggaggacactggaaaggggagatgaaagtccctttttcctccatcacctgcctcaaacttcctcttgcagtccccggtatcctctgtaggttgggggcttccttcctttaccttttaaaaaaatcttcctgctcccgattcttagacctcacgttttctcttttcctttatgaatctcacctctctcaccttcttcaggtttaaatactccaattttccctttctctaaacttagaaatttccatgcatcaccctcttctagaattcatccctcaccattccttatataattgatttattgtaaagactcagaaataaatcaaacattctactaagaaaaattgagaaggggagctctgggggtggaaacatattagggtaaaagacttaaaattggaggcagcattatcagaagatgaagaacaactcagggatggggtgggaagaagacaggtccttttctgtacttcctagacaacctccattattccctaagggaatcagtgttgtgtctgtctacttttttttttttttttttgccacgtaattttacaaactctcccttttctaggcacccgaactctctgccatcttctctcctgggatgcagtcatcccatttgtatgcctcatacttcctctaccctggtagattctttcaagatccttgggctttactttcctcacataactcagttattctgcttctagtttaccattttattctggaaattgagagtcccatccaggggtggacttatgacactactgaaacttagacttcaaggttcctcacctacagggccctcttcctgtgctctaataatatagagggctcgatggatatgtgttcatatggtaacaggcttttgtaaaaattgcagaaataagattttaacagcaattgcttaaagccaattgtatgtgtaattttttttcttaaagactcccaattttgtaatattcaggcaccacagaaccaagatctgccccaaacttagctattggcattcccgtctcaaattctgttgtcctatgaaaaatcgaagaagaaaataagtcctgacccccttacccccagacccaccttgttcttatccccaggcaccctcccctcagaaacgcaggcttctgctctccccggtcttcagcatggacaggtgtgggagggggctggggatcaggccagggaagctgggcgccagtggtaactcttctctgatccccgtctttcctgctgccagtgaatcgaacgccacactcaggtgagatgagaaacccttaccgcgcgcactgcaatgccctccccttcactctgcaccctccacccccctgaaattctgcccttaggctacggggcgtcgtcctttcgcaccttccccaacccaccccagtttgcggccacccccttccctccctacctgtttcctgcctccagtcccggttttccacgaggctgcggtctctccttgtccctgcttggctacacttccctgggctccacctcctcccagactgagcctcgccggtgtcaggcagagcccagcagagggcggcagggtgctgggagaccctgagctcccaccacgttttcccctgtggggttccttgcgaccttcgctggaaccttttccagcctgctgcctcctaggatttcacctaatggactttctcagcctgtcccacccatcccaaccctggccaggcctctcgcgctcttccccacatcttttccttccgtgtaccccttccctcgtcttttctcaattccatgtcctgtctccctttcttaggcttctgtctacccagccccaggctcccttccacgaccccaccactccctcaaaccagcctcccttccgtacccaactcgttccctccaaaaccgtttcctctcccccacatcctcagtgcttcactgtatcgactcatactcccacttcagacctcaggcgccagccccgtttctctcccgtcccactcgcatccttcccttcctaccctggttcctccgtgcttcagcctcccgcggctccctccgcccaccccgccctcctggcacgccccgtccccatttctcctcccctcgggtccccttaagtgagatccctcccttcctctttcgttcctttcctcctcgaggttgcatcccccctcccctccccgcccctccgactgtcgctcccacctcggcgctcgcttccctccccgcccccttcctgcctccccagctcccgcccgcccccccaccccccgctgccgcgcgccgcccgtgacgtcagagccccctcccagccccacatctccctcctgctcctcctcctcccctccgtcggtcagtcagtccgcgaggagagtccgcggtggcggcgacggtggcgagagccgcgggggccgtaggaagccaaccttccctgcttctccggggccctcgccccctcctccccacaaaatcagggatggaggcgcctccccggcaccctcttagcagccctccccaggaaaagtgtcccccctgagctcctaacgctccccaacagctacccctgccccccacgccatggggcccggggccccttttgcccgggtggggtggccactgccgcttctggttgtgatggcggcaggggtggctccggtgtgggcctcccactccccccatctcccgcggcctcactcgcgggtccccccgcacccctcctcagaacggcgcgcagtgtacatcggggcactgtttcccatgagcgggggctggccagggggccaggcctgccagcccgcggtggagatggcgctggaggacgtgaatagccgcagggacatcctgccggactatgagctcaagctcatccaccacgacagcaaggtagccctggacatgggggtgggtgggaggtgggggcttgcggggcagggggccagccagctgcacgcgcccccatctgtctgagtcgtctctgggattgcgaggcagacccctcccttgtgtgactggcaggagatgggctgggggtgcaggagcttggggagagtcgcaggggctggaggtccaagatgagggtctaggggctcaagatggttaagcatgctgcaaggcagacccttctgccccgctgcgggagtctcgcagaagtgtcggggtttggagaaactggtggtggatttaaggtattaggagacactgatcctctgagggagtaaactaaccctggaatgggttgggggtggagggaatgtcagaggtggggagctggattgggggtttacatttaccatggtaacaaggtaaaatcttggcgtaggttggagctggaaggaatagggacagaatgaggaaaattttgagagacttgagagctctagtttatttatcttaacaaaacagcaaggtagtggtgagccctacctgactccttctcatccttctattcccaaccctgttgagcattcccagactgtgggatagatggcatatggtgattggggaaggctaatgatcaagaggtgggcagaggcactgggaaaatgaattggattggggatccacatgggaacccccacaatagcatggggatgaagaagagtcaacatacaaggagaagagaacagaaaagaatggcagtgggggagaggggcaaggaggtagcgtggggataatgagagatcttggggcaccttatggaacttgggtcctgaccttcccttcccttatagcattgtggcctctaggatgtgagaagggaaatgggatgtagggattagggaggtgagttgagggagagagagaaggtaagcaaatttgggtccaggggtattaggggatagcttataatgaggttttttttcccacccctctcccctacatgaataattgggggtgcagggaaggatgtgacacagggaaggagatttaagatctcaaatttatcttcactgacatgtggccccagagacttaaggaattgggttagggtgaaatagagtacacaaggtgagaatttggtgatcttaccaaatatcaaccttggggtgatccaaggatttatattcatttttagaacatcactatacacctagaaataggtgtgtgtctgggataggtgtgtgaggggacagaagtgaggttgaaggtagggtgcttgaagagaagagagcacaaggattatcaggagcttggcaagagaacttaaaatcctttttgactgttactttctcgtggttctcagccttcagtgtacataagaatcaccagaggagtttgttaaaaatacagattctagctccttggtcagggatgaatcccaagtatttatctgtatttttactaatagacatcctatcttggtggattcctgagctgtaagctaaccccagaatgcctatgggaagagcagcagggtacaggaaaataattaggtattagggtacgggaggcaggaagagaagtagaggatcagatctggtagagggtcagacttgggacagtcagagagatcattggttttggggagtggagtgtgaagaaaatgacagggagagatgggtgcaggctttatgataggggatcacaggagataggggaggcctggctgtgagctcaaactcatccaccatgacaggtgattccctggaggtggcggggagcagacgtgggacctgggagaagggaactggagaacatcagaggcatcaagcggggtgggatgggaaggcagaagaaccagaatgtgtcaattggaatgagtcggtttcctgcctgcaaatccagatccttgcaagagcaaagagagggaggagaactaaggaaatctattggggagggggagagaatcacgtggtggagagaatctgcagtgatgaatagtgtgtggaagagggaaacggttgcaagaaaaggtagataagaaatcaggaaacaaaatggggggcatgccttgccctgttgatatgtatcttatatgttcttgtatgtcctcattgttcctattaaccctgtctttagagaagtggaggggcactgaggggctgtgggagaagctgggagcaggatctggagtaatagatgtggggagagtgcaggaaggtgggtcctgagaatggtaaagatttacaaagttgccctagtgggaggcataaagagaaaaccttccaatgttgttgagcactgcccttggccagagtgagggtagggtgggcaacagagaattctcagtgactgctggttcttcagattccaacagcttcccctggctcccccttctccaacttcccaccgtgtcccaaatgtcaggcctcagtgggaggtaagcaggctccagagtgctttctttatttcctttctacttatcctcccctcctggcaacatttcaccctccttagtcccctgagccccctgtctgtgtcccctctgccctggctccccactggctgccatttcgtcttcacatgcattggggttccagcagcttctgaaatgtcatatatcagtgggaggggaacaggcagtgggagacccaaggctggctcttcctcccccatttcccctcctcccaagcttcctttcttctccagctttctgcttgtttactttccctagctccaagcctctctttaaggcacctctcaaattgtctggtttcttgagagttccattctattcattctctctgttctttcctcatcctacattcttccctacttccaccccccagtgtctttttttctaatggacctgtcaaatgtcagcgcccagcaggagggatggatcactgagcgggaccccctactggtcttgttcctgttctctctttacttatcactagctctgaaaagagaagagggaggaaacaaatggaaggtggggagaaggggtttgcagaggtgaggaaggaattttcataatatggctttgagcaagctatctggggatgtggaaagagtttaccgtattcctactgacttcttccacccactggtgtttgaagcatagaaacatggggtaaagggcttggtgacagagggaagggggatgtctgagggtgagctgaaaggaggtaaggtggtatgttcattaataccaaaggaggggtgtgcaggagaggtgatgggtaaggctccagatggaagacagagaaggaagtttaatgaaagaggagaaaaaaggcacttgacaggaagagatgccagaaaggagaagaaaacggtaattaatgatgaaagtgagtaattgagaaaggaactaatttgttcgagaaagataagagcaggaattgcagacaggggaggggccccaggagagcttgccctcatctcctcttgtctttcagtgtgatccaggccaagccaccaagtacctatatgagctgctctacaacgaccctatcaagatcatccttatgcctggctgcagctctgtctccacgctggtggctgaggctgctaggatgtggaacctcattgtggtaagcagggctatgggggtcagaagatggggtcattcccttttgagctctactgaagggacgatggcgattgtgggtttgtattgaaaaggagtgtggaggacctgctactaagattcagagtcctctgcagacctgagctaggcagcctcctagcaacagtggcctgacagtgctgcagctgacctccttcttcagaaggaattgaaattagatcagtgaaagagcatcccggttgtgaggggtgtgtgggcctttgagaatctcttttccttaggcagaccagaggtggggaggtttggagagagtaaggaagagaaacccaaaggcaggaagagggttaaaggaactcttggccactcttggtgtcctcagtgaacagaccctgttgcactcactctccctgccccacagctttcctatggctccagctcaccagccctgtcaaaccggcagcgtttccccactttcttccgaacgcacccatcagccacactccacaaccctacccgcgtgaaactctttgaaaagtggggctggaagaagattgctaccatccagcagaccactgaggtcttcacttcggtgaggaggggttgggcaaggggtaaagggacataagctcaaattccagcaccaggagatgtgacgtgagagtcacttttaggggcaagaacttgattcttcattgaaagagaacgcattccatgtggattaagtgcagttctttctgtagccaggggaaagaatgagttgagtttttgggatcctctctgtctttatgattttatgatttttttcccctgtttgatgccctgttccccagacatatagacccagaatgactcagttctgttaaagtaggttcaatccaaagtgggggcaagagatgggagcgaagatgagataggaatccaggaaggcagcagattccagaggctttcaaggggggtggtgggtgggtgtgaatgggaacagaggggatggagccagtggattacagaggagagagggagaggaaagagagagagagagaggaatgagggagaggagagagaggggcagaaaggcagctgcatggatctggtagttggtactaagagagagaagccgacagacaaggagaggttgagggggaagagggagatttggggaggtagagaggaaatacaggctctacatctgaagaaggcagtctgctccctcccttttattctattctttgggtcttctatccactgtgttcagtggccctttaatcctcccccactttcactctgattcagaccattcttctctgatcctttgtctgtctgcccatttgcctcttgaggttgacatcatgctgtctgtcccagtccttgccttgtcttttcctggttcctttatgtttctttaccccatctttgccttcagtggtaggagtgggtgaatggagtggcttcccccacacagagcctcagcaggggctcaccattcaccttcccacttggaatccacatcctaagaccagatgccttcccgaactcctcacttcagggacagaagctgttgaaggaaggttcagaatggctgcttctttgctctatctgagtattgctctgaaatccccagttaacctctctggtctttattccctcatgcaccccgtgtttttccaacttgttttttattcccacccaagactctggacgacctggaggaacgagtgaaggaggctggaattgagattactttccgccagagtttcttctcagatccagctgtgcccgtcaaaaacctgaaggtcagatggctgggagtggtgggctctgtttacggagggaccaagctgggggacagtgactggttggagaggaaagccaggcgggggcaggttttgattctctgaggcaatagcatctcctggggaagtttagctccatcttccagttgacgtttattcactatacgttgagcgttaccctgcactaagcactttgggatgggaaatcaaagctgtgaagacatctggcttagcccctcaggcattcccgggcatccctcaggagctgtttctttctctgttgtagcgccaggatgcccgaatcatcgtgggacttttctatgagactgaagcccggaaagttttttgtgaggtggagttggatctgaagagggaggggcactgggtgggagtttcccttggttttcttgtggggcctcctcttggcatctgtgcctgagttgatagcatatgatctgaggtgacgattcataggatgtctctgtctgttggctctgactgcatcccttgtctgcacacacatgatactttcttcagatctcatttttctactgctttgtgtttcctgagaagcccatgaattccatctgtcctgactggctggaaaaggccactcagaaatacaggggctggggagaaacttagaaggaagaattgtcagcctttcctactatccccaagacttgtagatttctctttttagttctactgctcttccctgattcccaagaggctaaatagtatcaagtgagataagacaaaaacaaacaaatgagcaaacaaaaactcagccattctcctctgtattcaggtgtacaaggagcgtctctttgggaagaagtacgtctggttcctcattgggtggtatgctgacaattggttcaagatctacgacccttctatcaactgcacagtggatgagatgactgaggcggtggagggccacatcacaactgagattgtcatgctgaatcctgccaatacccgcagcatttccaacatggtgagagtgtggggacttgcagtctggcacctgggagggtggagaggactgagggggccttgcaggggaaagggtggcagggagagggtgcggaatttggatataaaggagaagagggggctgtgcccaccctgaacttgtctgcattatgtttcctgtggatcctacctttgctctgacttccttgggtagagagagaaaaaaaaaaaaacgatggagttgtatgttcagtaggttcctgatgagtggaagggctgttaccatggagacgaggagcagttggtgagaagtcaggaggaaccggcattaatgataatatggatgcttgtatactcaagcacacctttacaggagcactgtgtctgggcagaattgcatttcattttcttggtgatttatgttagtgttttagagttgcttaatattcactcatgattgatatgcaattagcttggatcctgttgctttttttaatgattctttttttagaattttatgtggagaaggggcttttgaaatcatttagccccagacagctggttaatgacagacttggagcgaggaggcgcattctctgatttgagagggctggggcagccctgcagctgaggggcagaagtgagtgtgggtgtgggcacaggggaagaggcttctttgttgctcagcactacattgtaaagagtacaggaattttgggtaagctcgatacggccacctatgtgtctgcttattacaccaagtgtgtacctgctttggagagcatgttaggggtgagttaatggttgtaaagccccaaaatagcttgatttaaaaagttttactaacagtggcatttgtgtggtacttagattcatgatttcagggattctaacagcaaaactctgatgtggacttatctacattttgtagaccaggaaaatgagactcagagtggtttaatgacttgtctcaggtcatgcagctactcagcagtccagctggaattgaatcctagttaaatctggctccaaactgctctgctcatcacttcccatggaaaaccatgaagcctgactaaaaagtttgtacttttatctgctaacactgtttagctactggcaattgctgagcaaaggagaaataagatttaggaagttgactctggtggtgtgttgtgatgaaagatctgctgccacatggactctgatgatacacactgttttgggacattctaaatggactctatgttttaaggtatgttagttgaaaaatacaatgaaaaaattttggaagatcactttcctgtagagtacccaagaggtgagtcatccataaaacctgggaaagtattggaactggctaccaaagccagaaagacttgttggtgccctgagcccaggacttgccaatcgttgcttctgtcttatagcagggagctagaggaggctgacagaaaacagggatttggctggatctagtggctcacacctgtagtccccagcaccttgggaggccaaggcagaggatcactggagcccaggagttcaagaccagcctgggcaatatagtgagacccccagctctaaacaaaaagagagagagagagaacagagagatggttagggacatagagggacacctgagcattggggtgggaagacttggaaggtccctttctgactttgtgtctagagaaagatggttcctgcttttgaggccatagggcttccagtgggaccagcctaaaatgccagtggggaagccaatgttttctgaagaggatagagcagtcttaacaataggttaggggcaaaagagattatagattaatcaaacagcacaaatagaagtggatcaaagcaagggttggacctagggggccggagccatggagacttagaaaagaagcagagttgcttttattccctaaggatggccttatgtttagatcaatagttctcaaactttaacatccgtcagaaccacctggaaaggtagttagttcacaggttatcaggcccttcccctggaaattctgattcagtagatctgggctagggcctgagaactgacatttctagcaagtccctggggatgcagatgtactggtctggggatcacacctcgagaactattagttagggtagtggttttcaactactaccctagactcagacgctatactatctggaggcatttttggttgttacagttgggggtaggggatggggagggatacatgctcctgatatctaatgtgtagaagccaaagatgattctaaatatcctacaaagcacagcccctggcaacaaagaattatcttgctcaaaatgttaatagtgcagagaatgagaaaccctagtttagagaaaacatctttaggggcaatatgtggaaatggagagtgggttagagtggttttagagaaatgtagctgtgggctagaggggaatgtgggaggtggcatcctggagataagattgtgaggaaatcttgattggggtagagatcccatcagacctaggaccagtacaaactaaaaagctacctcaagatatacattttagcccactgtcaagcatccattcttgagagccagacaaggctgttaaaaaaattaggtataaatttgcacttggttgattaactaattgctgtgggttgaggggtctttattgttcagatttccttaagctgcagagtagagtgtctctttgacaatctataactgtatctttactgactcaagggggaagcattctactcttctttactcttggggtggcaggagcagtggtgcccccagtggttaggcgtgttagtggtagtgacctggcgtgagcacagggtctgaccacctgagcaggggaccgcatcgtgctgagcagattaatccctttctttctgggtgatttttttgatgccatatttaccttgaactgaagattggatagaccaatctttcaatttgaagccaaaagactactcaaagtattagcctagctgctatttgtgcaggtgctcttagagagaggcagtctcatgtacagagactgtgtagggtggctggtaagagtatggattagctctgctactcattaatagtataacttttttataggcaagttatataacttttctgtgcctcagttttcttatctctaaaatggggataataacacctcattggattgtttgaggattaaataaggtaatatagtttcctcaggaaaatgctcgatacgtcctaaggactgtatacatgttagccaccatcatcgttatcattatcatcatcatcctgtgtaaggagggatcgatatcaatgaaacatttcaacaaaagagttaagaggactcagtgatttgaaagggtctgatgtaattccaaggcttcagtctcatttactgggagctgtttgggagtaagaaaaaattgagcttcatcttggatattttgattttgagattattcatcatacattaaaaatgcctcagagtcagttagaaatatggacttgaggctgggcgcggtggctcacgcctataatcccagcactttgggaggctgaggcaggtggatcacaaggccaggagttcaagaccagcctggctaacatggtgaaaccccgtctctgctaaaaatacacaaatcagctgggtgtggtgtcgtgtgcctgtaatcccagctacttgggaggctgagacacaagaatcgcttgaacccaggaggcagaggttgcagtgagccaagatcgcactactgcactccagcctggcaacagagcaagactccatctcaaaaaaaaaaaaaaaaaaagaaagaaagaaagaaaagaaatatggacttgaaatattgggctgaaattatagatctgagtatcaataacaaagatgaggttgagagtcaaggaaattcacgtagagaaaatgtaacttacttcatacccagcatttttatacatgttctaatttcatttcatactattttagatagtattattctcattttaaagctgaataaccaactagtgaggtttaataacttgtttgagatttcatagcaggtaaaatgattagaatatgaattcatccatttatctatccaacagacttttttttttttttttttttttttagtagagacggggtttcaccgtgttagccaggatggtctcgatctcctgacctcgtgatccgcccgcctcggcctcccaaaatgctgggattacaggcgtgagccaccgcgcccagcctttttttttttttttttttgaggtagagtatccctctgctgcccaggcaggagtgcagtggtacaatcgctgcagccttgacctcctgggctcaagtcatccacccacctcagcccctcccaagtaagctgggatcacagacatatgccaccaagtctggctaactttttttttttttctcgagatagagtcttgctctgttgcctaggctggagcacaatggtgtgatctcggctcactgcaacctctgcctcctgggttccagtgattctcctgcctcagccttctgaatagctgggattacaggtgcgtgccaccatgcccagataagtttttgtatttttagtggacatggggtttcaccatgttggtcaggttggtctcgaacacctaacctcatgattcaccctcctcagcctcctgaagtgctgggattacaggcgtgagccactgctccaagccaagtccggctaattttttttttttctgagatggagtcttgctctgttgcccaggctggagtgcaatggcatgatcttggctcactgcaacctccgcctcctgggttcaagcgattctccgattctcctgcctcagcctcctgagtagctgggattacgggagcccaccatcacacccagctaatttttgtatttttttttttgagacagagtttcattcttattgcccaggcttgagtgcaatggcgcgatcttggctcacagcaacctccgcctcccaggttcaagccattctcctgcctcagcctccggagtagctgggattacaggcatgcgccaccacacccggctaattttgtatttttagtagagacagggtttctccatgttgctcaggctggtctcgaactccggacctcaggtgatccacccgcctcagcctcccaaagtgctgggattacaggcgtgagccaccgtgcccagctaatttttgtatttttcatagagacagggtttcaccatgttggccaggctggtcttgaactcctgacctcatgatctgcccgccttgacctcccaaagtcctgagattacagatgtgagcctccgtgcccaggccaagtctggctaatttttaaaaaaattttgtagagttgggtcctctctgttttgcccagtcttgtctcaaactcctgggctcaaggaatcctcctgcgttggcctctgaaaatgaaaatgttgggattacaggcgtgagccccctgtgcctggctgcctttttttttttttttttttaaaggcagagtctcactccatcgcccaggctgaagtgcagtggcgtgatctctgctcactgcaacctctgcctcttgagttcaagcgattcttctacctcagcttcccaagtagctgggattacgggagcccaccaacacacccagctaatttttgtatttttagtagagacgggtttcaccaggttggccaggctgtctggaattcctgacctcaggtgatccaccctccttggcctcccaaagagctgggattacaagtgtgagccactgtgcccagcctgacttgttttttataatgccttttttttttttttttgagacggagtcttgctctgtcgcccaggctggagtgtagtggcgtcatctcagctcactgtaacctccacctcctgggttgaagtgattttctcacctcagccctcagcctcctgagtagttgggactgcaagtgcacaccaccatgcccagctaattttttgtattttagtagagatggggtttcaccatgttgcccagctggtctttaactcctgagctcaggcagtctgcttaccttggcctcccaaagtgctaggattaaaggtgtgagccactgtgcctggccttttttttttttttttttttttgagcagttttagtttcccagcagaattgagatgaaggtacagaaacttcccatatgcttcccacatgcatagccttctacattatcgacatcctccgccagagtggtacatttgttacaactgatgaacctacattgatacatcataatcacccaaagtccatagtttacattagagttcacccttggtgttatatattctatgggtttggacaaatgtataatgagacgtatctactattaaatactttacagagtattttcactggcctaatccaatggacatttattgttacttcattatggttgggcacagtgctagatgctgatgattaagagagggcatgggatttggtcttgtcctcaagggtagaacctaggcccattgcatcttcaaagcccaggctccttcaaagcccagtgtagtagcaactgctgtaccttgcctgtgccctttgcgtatctcactcctctatctctctagaaagttggagagaaaagtgagcaaggcatgaggaacaaagttatttatttattcttcattcatctatttattctttcattaccgtttgtgttaaaacattccaaacccaaacaattatttgtatggtcccctgtgtattacttgtggtttcccaagaagtagttgctaagcttttccttgtatggtttctgtgaggtaaggaaggaatgatgtgattttctccagtatgtagaatgcagttccaagaggttaagtaatttacttacagttatttagccaaacaaggttactgcaaggtatatgaagtcaggtctcttgacccagttcatgagagagttaaaggaactatcattctttttagctttcatggaaaaagaaggttgagtgttgggaggggtgtgggtaggattgataatggacttcaaaaatgtgaagggtatttctgtagttttcattcttctgaaagccttctaagaggcagtgaaccaaaagcacacaagaatggcaagaagttagcatgctgaagaaatatcctcctggctggcaagcagagtgagaagactgctatcaccttttctagaatcttttggaattgtaggagctgttagatcctgggttaactctatgaagaaagtcagaaggatcagagaacatcagtgtcacagctcttcattggaatatccatgtctcctcctttactctgctctaccttccatcctttgccactaattatccagagtgtttgtcaaaattctctgtttgcagttctgagctagcaactgtacacactaacaccatcagacacagctaatacctactctagtctagtagcttccgatctaaggcagacacatgggtatagttaaagattttgaatgtacatgtgtccaatctgacaacagtaacacaaaccatccattcaagtagaagtgattgagtcagaattggattgcaccccttcccccacacccacacacatttcagttctttcctcatgattttttcctcccaagacatcccaggaatttgtggagaaactaaccaagcgactgaaaagacaccctgaggagacaggaggcttccaggaggcaccgctggcctatgatgccatctgggccttggcactggccctgaacaagacatctggaggaggcggccgttctggtgtgcgcctggaggacttcaactacaacaaccagaccattaccgaccaaatctaccgggcaatgaactcttcgtcctttgagggtgtctctgtgagttaaaacttccttcatactcccctgtcttcccaatcttgagagagactcccaagaggcaccttctacaaacatgcattctctgtttttctcagttacttctttgcagaatcagtctccgaccagagaagtagggaccttcaaattagaagaacccatcaaagactagaggaaaaaaaatgatgtattccatttttttaaacccctcccctcatttcttttcaaactagaccaagtattcatgagtcagatgagaactataggattttgaaagacaaaacagtctgaaaggtcatcttcttattccttttaaaatgaaaagattagtttccagagagatttgctgacttgcttaggccacacaaccagaagcctgctggtgttctgtctggggattttttcccattcaaatctcataagtgaagctccttctccaaagaataatgtttctaaaatctagggtatgggcatctggggtatgtcctatatgcaggcaaatgccataaatagcattcattcagaggctcaattacatcaaaaacagaaggatttaaagagtccctgatgttctctttcactcttgcttttgtctcctttgccttgctccacatgttccttccctcagggccatgtggtgtttgatgccagcggctctcggatggcatggacgcttatcgagcagcttcagggttagtacaggggcaggaggggaccggacatgggggctaggctggggctgggctgggatgccccctggggaagaatgccagagacatcacaagattgccctggcacctcccaacttctgcccttctcttttaactctgttcatcaagcttgtaaataataataataataagcttaactacaagaagattgatgtctttgagttgcactggttttgctcttgaaaagaggtgtgcaggctgggtgtggtggctcacccctgtaatcccagcacttttgggaggccaaggcaggcagatcatgatcatggtcaggagtttgagaccagccagaccaacatggtgaaacctgtctctaccaaaaatacaaaaaaaaaaaaaaaaattagctgggtgtggtggcaggtgcctgtagtcccagctacttgggaggctgaggcaggagaatcacttgaacccaggaggcagaggttgcagtgagctgagatcacgccactgcactccagcctgggtgatagagtaagactctgtctcaaagaaaaaagaaaagaaaagagacatgcaaattaaaaacagctactctctttcccagtggcttccattaatttcaggaatttccccttgagtggcttgggttgagaggttgatgacctgtcagttagactcaagaaagctgaatctaggagaaccgctattttttttttaagggaatctgccaaatttccttgctgtgtaaagcttcaatgtgtatagcttggcttttgtagattgtattttcttgaaacttagcacacaggtatttgcagaacttctaggagttaatttttctgctccactcggctctcagtcttttacggcatggccaagagagctatttcttggcctcctgtgaaaagtttctttcttcctttctccccacctccacatcctttcagctcctctttgtatccaggacaagaggaaatggacttcagccatggtgaaaggagtgtgagttggcttttgaaggaaaagttatggtaacggaaacagttctagaacagaaatcttagaaatgaccaaattttactcaatggcgctttaagaggcagatataacttatccaaggaattaaaacccaagccaacagaagagaatgttctaaaattaaaatgaaagccactgggaaaatagagcctgcccatcatgagaggaagaataagcagaaatatgtgtaaagctttagaagccaaaatcaaagtgagagacatctcgccgagagaggtgtgaggaatggaataggtggcagacatgttgtggagcctcctcactgaagacttttaaacatagatattcttatttatttgagttgtcttgggaaccaccttatattgcttttaagtcatgttgctgattcaagagtctcgtaggtccttccaagcatccttagggcctcaggtgaaaataaaatcagatacaaccatgcaaagctctagggaagtgggaagttgaaaatgcctaggatcagctctttggctacctgtggtcactccttttattgtcgtctgcccaggtggcagctacaagaagattggctactatgacagcaccaaggatgatctttcctggtccaaaacagataaatggattggtgagtggatcttgtttgtattttccttcagcccctctcgacagtcaagggaaaaagtcatgcctttgagtgaggatggaatggtagagactgttaggttggaatgtggctggcagctgggccaggagaaagggttaagtgagagtgaatacaacccctaaggcgtgggtaggggagactggtgtatttggagagggaataggcggtggttagtactatttttaatggtgcattgctggggtaactggggattagaggcagggggtgggcagagggcgggaaatggaaactccatttgggtttcccagatgtcctggtgtcttgatatatttgaaccagctacttcaagcccagagctgtctctttgtctgtctctgtcaggaaaacggttgcttaaactatggaggaggagggaaaacctcatgtaattgtcatctgccaaaatgtgctttttatttttatatgtatttttaaaaattttcctatttttatgtaatttagaggtagacgtgcagttgtgttacatgaatatattgcatagtggtgaagtccgggcgtttagtgtgcctgtcacccgaacagtgcaccttgtacctaataggtagtattacatccctcaaaatatactttttaaagagagaaagcaagcagttattctttgtgtacttggtctaaatgataggacataggagagaaactgaaggtggacaaaaggaaggacctactgataaaagaaagcctccttgagaatgaaggggaggctcaaccattgaagatggctgccgtctgccctgcccagcagatatccagtcattcccagcactgctggagttttgcccttttttttttttttttacaattcgaatttaggacaatgttctggattgctataaatgctgcatggcctaaattattctttaaaaaaaaaactaagcaaattgaaattagttttttttggtgaactctgacaaatttgaacttccccctaataataactggaaaacatatttgggaatattaccctgccaggattaaaatttcagattagctttccttctttttttgtttgtcttaagaataggtgtccacactagatacttcaaggcctttttagctttatgattccataattgtcatttaaaactttgatttgggttataagaaaccttataacattttttaatgatccccttctttctcctcccattttcctttgctgtaagaaagacagaaaaacttaaagaacaaacaaaaacaaagactacaactttggggacatgcctcagcatttcccaacctatggatagaccattcactccatcttctcatctcatttctggttgcttcctaacggccccagtggcactgagcattctgcctgcagtaacctctgtccagtgcagttagggcctcatgtccccagccaatgactgaatgtccatcagcaatctagttctttgcccttttctcctatcccgtcttcattcctttgtcctccttcccttctcttttcccttcccctcttcctcccctgtgccatgcaggagggtcccccccagctgaccagaccctggtcatcaagacattccgcttcctgtcacagaaactctttatctccgtctcagttctctccagcctgggcattgtcctagctgttgtctgtctgtcctttaacatctacaactcacatgtccggtaagtttctcttctgacgttttccttgtctgcctctctgagatactgatcatgttcctggacaggatgagaataaaacctgtgtaactcccatggccatgtatcatggagtttttcattctgacttgttgagaatgaaaacagggaaaccagatataacccccactcctactccaaagtagctaacgggaggaaaaaagaaaagaagagaaaaaaacaacctttggggccaggtctcacagtcttggactctacataaatagcctgtattctagtgggggcctgtgcttgggaagccctctgcaactccatcttcagccccatgactgcattgctctgcctctcaaggctccactgtcttctccaatcctgtcttcctttagcccctggccctgaaattagggtcatgccattgcgtggtatttggagagctcagcctccctggagaagaggggtaattctctctccctctcaccctctccacctctgccctagttatatccagaactcacagcccaacctgaacaacctgactgctgtgggctgctcactggctttagctgctgtcttccccctggggctcgatggttaccacattgggaggaaccagtttcctttcgtctgccaggtgaggaggtggtgggcaaattccttacaggatgtgactctcccacccgtctcaggagcaccttccatgatttatgattctctgcccttcctcctcagctttccctgactcttgtccctgttctttccttctagcatcacccctctgttctctgtttggctctgtcccttctttctgtgtctgcaggccattttcattctgtagtttacttgtcagttccaaggttgccatggcaggccttgcagagaagaggagggagccattgaaggcaaaggaaggggatctgctcaaaggtctcctgaacaatggtggcttgtctgtggtatgggggctgagaatcagaactgtggactttttttgggagcctttgttgggtttggaaggatagaagcagagatggaaacacagcagagagttggggggaagggaccactgccacacagggaggaggggctctgggactgttggtacatggaaggttctagtgctgtggggagaggccagcttcaacagtgatagttgagtggttctcttttccactggtggaaacacccactctttctcctgatctgcctgcctgtccttgctctctctttttcctctgctctgtgctgtcctgatcatacatctgtgcacatggcatttccatgcacatgcacatgcagttcatcaggaatcctctgttcccagtgaggccagagtgcagctggagaagcagacaattagctgtagtgcaataggagaggttccagagtagggatctgcacaaagtgctttgggggcaaagaagggaacacagttcactgctggcgtgattgggtggacctcactgaagaggtggcatttgaatactgaaggacaaataggattttatcagctagagaaatagaggaaggctacttcaggggcatagggagcatcgtgtggctagaaaatacatgaaagagagtagatgaagagaaagtgagtagttcagcatggctggagcgtggggtaggtgtggggctgggagatgagcctagctggacaggtggatgggagcatgttgtgaagggtctgtgtcatatccagaagtgttcaggctataacttatagatattggggagtggttggaggtttttggccactaaagccaggaggttttagcaagatcaccctggtggtgtggaagtagagggtggatgggaggaattgttcaaggtggggagactgctctcctcctgccgctccccgtcctgctcacattttcgcatcctccctgtgccaccatgagctccctgcccgtgctccctgcccactctcccttagggttctgcccatccttactgcagtcccggctactactctaccctgttctgcctgtgccctctcttcctttctaggcccgcctctggctcctgggcctgggctttagtctgggctacggttccatgttcaccaagatttggtgggtccacacggtcttcacaaagaaggaagaaaagaaggagtggaggaaggtgagctgctgcccaatcctcagcccccagatccttggctcctggggcacagagcattttcccctgacgtgcctgttctccccacatatttatccagactctggaaccctggaagctgtatgccacagtgggcctgctggtgggcatggatgtcctcactctcgccatctggcagatcgtggaccctctgcaccggaccattgaggtaccactggagaggaggtgctatggtcaggagaatgagcagggctcagtggccatcagggccctggggctgtgtgtgtcttgagggatgaagctacttggagagagtgccttcctcgtattggaagctcttcctttccttcctagaaggagcccctcataggcctccagattcagctgaagaaaggaaggggtgggaatctgggaagggtgtgtagaacttccaggcatcagggaaagtggggaacaagcacctccaagggttcaggaaaacattcttaggcctagaatgagatttggcatcagcattgagggtctcataggaaaacagttggaagccagagactgagaagcgttgaggagaggaggggaggctggcaaccatctttcttgtgaccttgtttctgccctagacatttgccaaggaggaacctaaggaagatattgacgtctctattctgccccagctggagcattgcagctccaggaagatgaatacatggcttggtgtgtgggatgtgggcaaaggagggcagggatgcacaaaggcaggagggaaggcaggggtagagggcttggagggagaggggtctttggaagaggaggtagagagcttgtcaacccagtttgaacaccctactctttgttattgcactaatcttttctgagaataggggagagttgctcttttgctatgaggagcttagggcccaaagcacagaaagcacagatgaagaacttgtgttcagcagaggaacaagtgggggtaaccccacctccagacttgacattatcttttagatcccccttggccttattagcattgttcgattcatggtcacaaattgcaaacctaccctctgcctggaaagccaccttcccacctgtagggtaagggtgaggcatgtgtggcccagactggcctatttctagatattcaacaagcccttgcctgactgacagcagcttgccaccattgctttcctgtgtgaatcccaggaaaaagtgatgtggtctgggcaagttgggtggacataagggataggggacacagggtgaggtttgctaggtcagaggggttggattggagaggagggccccctttccatttcagagtaggtgaagggcagagaggggatggggattgagtgaggagcattgtggtccttgttgctcaagtgactctctcctgccatcctaggcattttctatggttacaaggggctgctgctgctgctgggaatcttccttgcttatgagaccaagagtgtgtccactgagaagatcaatgatcaccgggctgtgggcatggctatctacaatgtggcagtgagcactgaccccatggcattgaccctgtaggctgaccacagcagcccagatatagaggactaggaagaatcaatgctagatctgggatcggttgcttagaagtcttaaaaagtttgttaattcttcaggtctataaagcactttacagtttacaaagctcactacagacattgtatcattaatcttgcaactacccagtgaagtagatattagtatccccactttataggtgaggaaacagaaacacagagacgttaaattgcttgtctgtggttaatgggctggactctattgacatttcctgccagggaccgactctggaggacccggaatctgtgcatagagatcctgggagttcctgccttgaggggaggggttaaccaagagtgaaaactggtttgggacagtttgagatttttctcaatctatatttgaggatgatcctgaatttggatccttttcaaagggaaagttcaccaggaaactgtctgcatagactccctcccatgggaagtaaactctggatcttgtctgagcctgcagacctgagactccctcaatgtgtctttccctctaggtcctgtgcctcatcactgctcctgtcaccatgattctgtccagccagcaggatgcagcctttgcctttgcctctcttgccatagttttctcctcctatatcactcttgttgtgctctttgtgcccaaggtaaggatctggcttttctcccaccctctttgttcccatgttccctccatccctccttcctatattactgagttcctctgcccttccgttcaccctcctctcactcctccccttgttttgggcccaactcttatcagcattccttccacctccaaccttccatcagccagtcactagtacagtccttgctgggccaccccacgcccaaacatttgcccccagatgcgcaggctgatcacccgaggggaatggcagtcggaggcgcaggacaccatgaagacagggtcatcgaccaacaacaacgaggaggagaagtcccggctgttggagaaggagaaccgtgaactggaaaagatcattgctgaggtgcgggggtgggtgtcagggtagggtgttggagtggtccaggaggcttgcgtcttagcttgggttgtctgaagccaagcctgagatacagggtcagatgttcttggctcatggagggagggtcctaggagacaacctgtaaggagtgaatggagcagcataggggaggggaaagggctgagcaagattctatctcaggcaaaatccagtgttggcctggcaggtggaagggctctggagtgggagctatgtggttgactcagcctccttaaggcaagaggatggctgttggctgtaggtgacaactggagagaggcagctgtgagcctctagtagtcaacactcacagcagctgggtgtagcatgcagccccagcataaaggacctgggcaggcgttcactgtgccccaggctgtcattaggggctggtgcaatgccaaagagagggatgttccaactgggttgacacatctctctgatttattggaagctctgtgcactgacttttctctccttccccactttttccttttgtttttaaattctctcttatttccctgatcgcattttttctatcggtatccttatgttctctggcttttcttgttctgttttgatttctccttttaatttattctgtccacttaccctacgtcctccccctacatttttctgtgcccttcctctctttccctgtgcccttcctctctttccctcctccccactccttcatcacctcctcttctcctactatcccaattgtgcttcttcctccagaaagaggagcgtgtctctgaactgcgccatcaactccagtctcggcagcagctccgctcccggcgccacccaccgacacccccagaaccctctgggggcctgcccaggggaccccctgagccccccgaccggcttagctgtgatgggagtcgagtgcatttgctttataagtgagggtagggtgagggaggacaggccagtagggggagggaaagggagaggggaagggcaggggactcaggaagcagggggtccccatccccagctgggaagaacatgctatccaatctcatctcttgtaaatacatgtccccctgtgagttctgggctgatttgggtctctcatacctctgggaaacagacctttttctctcttactgcttcatgtaattttgtatcacctcttcacaatttagttcgtacctggcttgaagctgctcactgctcacacgctgcctcctcagcagcctcactgcatctttctcttcccatgcaacaccctcttctagttaccacggcaacccctgcagctcctctgcctttgtgctctgttcctgtccagcaggggtctcccaacaagtgctctttccaccccaaaggggcctctccttttctccactgtcataatctctttccatcttacttgcccttctatactttctcacatgtggctccccctgaattttgcttcctttgggagctcattcttttcgccaaggctcacatgctccttgcctctgctctgtgcactcacgctcagcacacatgcatcctcccctctcctgcgtgtgcccactgaacatgctcatgtgtacacacgcttttcccgtatgctttcttcatgttcagtcacatgtgctctcgggtgccctgcattcacagctacgtgtgcccctctcatggtcatgggtctgcccttgagcgtgtttgggtaggcatgtgcaatttgtctagcatgctgagtcatgtctttcctatttgcacacgtccatgtttatccatgtactttccctgtgtaccctccatgtaccttgtgtactttcttcccttaaatcatggtattcttctgacagagccatatgtaccctaccctgcacattgttatgcacttttccccaattcatgtttggtggggccatccacaccctctccttgtcacagaatctccatttctgctcagattccccccatctccattgcattcatgtactaccctcagtctacactcacaatcatcttctcccaagactgctcccttttgttttgtgtttttttgaggggaattaaggaaaaataagtgggggcaggtttggagagctgcttccagtggatagttgatgagaatcctgaccaaaggaaggcacccttgactgttgggatagacagatggacctatggggtgggaggtggtgtccctttcacactgtggtgtctcttggggaaggatctccccgaatctcaataaaccagtgaacagtgtgactcgg

SEQ ID NO: 4 - protein, 961 aa, Homo sapiens [sequence omitted]

SEQ ID NO: 5 - RNA, 24 nt, synthetic construct
  misc_feature 1..24: note = EGFP siRNA (sense)
  source 1..24: mol_type = other RNA
gcaagctgaccctgaagttcattt

SEQ ID NO: 6 - RNA, 24 nt, synthetic construct
  misc_feature 1..24: note = EGFP siRNA (antisense)
  source 1..24: mol_type = other RNA
atgaacttcagggtcagcttgccg

SEQ ID NO: 7 - RNA, 19 nt, synthetic construct
  misc_feature 1..19: note = Firefly luciferase shRNA
  source 1..19: mol_type = other RNA
ctgacgcggaatacttcga

SEQ ID NO: 8 - protein, 360 aa, Photorhabdus luminescens
  REGION 1..360: note = luxA
MKFGNFLLTYQPPQFSQTEVMKRLVKLGRISEECGFDTVWLLEHHFTEFGLLGNPYVAAAYLLGATKKLNVGTAAIVLPTAHPVRQLEDVNLLDQMSKGRFRFGICRGLYNKDFRVFGTDMNNSRALAECWYGLIKNGMTEGYMEADNEHIKFHKVKVNPAAYSRGGAPVYVVAESASTTEWAAQFGLPMILSWIINTNEKKAQLELYNEVAQEYGHDIHNIDHCLSYITSVDHDSIKAKEICRKFLGHWYDSYVNATTIFDDSDQTRGYDFNKGQWRDFVLKGHKDTNRRIDYSYEINPVGTPQECIDIIQKDIDATGISNICCGFEANGTVDEIIASMKLFQSDVMPFLKEKQRSLLY

SEQ ID NO: 9 - protein, 327 aa, Photorhabdus luminescens
  REGION 1..327: note = luxB
MKFGLFFLNFINSTTVQEQSIVRMQEITEYVDKLNFEQILVYENHFSDNGVVGAPLTVSGFLLGLTEKIKIGSLNHIITTHHPVAIAEEACLLDQLSEGRFILGFSDCEKKDEMHFFNRPVEYQQQLFEECYEIINDALTTGYCNPDNDFYSFPKISVNPHAYTPGGPRKYVTATSHHIVEWAAKKGIPLIFKWDDSNDVRYEYAERYKAVADKYDVDLSEIDHQLMILVNYNEDSNKAKQETRAFISDYVLEMHPNENFENKLEEIIAENAVGNYTECITAAKLAIEKCGAKSVLLSFEPMNDLMSQKNVINIVDDNIKKYHMEYT

SEQ ID NO: 10 - DNA, 720 bp, synthetic construct
  misc_feature 1..720: note = Enhanced green fluorescent protein
  source 1..720: mol_type = other DNA
atggtgagcaagggcgaggagctgttcaccggggtggtgcccatcctggtcgagctggacggcgacgtaaacggccacaagttcagcgtgtccggcgagggcgagggcgatgccacctacggcaagctgaccctgaagttcatctgcaccaccggcaagctgcccgtgccctggcccaccctcgtgaccaccctgacctacggcgtgcagtgcttcagccgctaccccgaccacatgaagcagcacgacttcttcaagtccgccatgcccgaaggctacgtccaggagcgcaccatcttcttcaaggacgacggcaactacaagacccgcgccgaggtgaagttcgagggcgacaccctggtgaaccgcatcgagctgaagggcatcgacttcaaggaggacggcaacatcctggggcacaagctggagtacaactacaacagccacaacgtctatatcatggccgacaagcagaagaacggcatcaaggtgaacttcaagatccgccacaacatcgaggacggcagcgtgcagctcgccgaccactaccagcagaacacccccatcggcgacggccccgtgctgctgcccgacaaccactacctgagcacccagtccgccctgagcaaagaccccaacgagaagcgcgatcacatggtcctgctggagttcgtgaccgccgccgggatcactctcggcatggacgagctgtacaagtaa

SEQ ID NO: 11 - DNA, 2387 bp, Photinus pyralis
  misc_feature 1..2387: note = Luciferase gene
  source 1..2387: mol_type = other DNA
ctgcagaaataactaggtactaagcccgtttgtgaaaagtggccaaacccataaatttggcaattacaataaagaagctaaaattgtggtcaaactcacaaacatttttattatatacattttagtagctgatgcttataaaagcaatatttaaatcgtaaacaacaaataaaataaaatttaaacgatgtgattaagagccaaaggtcctctagaaaaaggtatttaagcaacggaattcctttgtgttacattcttgaatgtcgctcgcagtgacattagcattccggtactgttggtaaaatggaagacgccaaaaacataaagaaaggcccggcgccattctatcctctagaggatggaaccgctggagagcaactgcataaggctatgaagagatacgccctggttcctggaacaattgcttttgtgagtatttctgtctgatttctttcgagttaacgaaatgttcttatgtttctttagacagatgcacatatcgaggtgaacatcacgtacgcggaatacttcgaaatgtccgttcggttggcagaagctatgaaacgatatgggctgaatacaaatcacagaatcgtcgtatgcagtgaaaactctcttcaattctttatgccggtgttgggcgcgttatttatcggagttgcagttgcgcccgcgaacgacatttataatgaacgtaagcaccctcgccatcagaccaaagggaatgacgtatttaatttttaaggtgaattgctcaacagtatgaacatttcgcagcctaccgtagtgtttgtttccaaaaaggggttgcaaaaaattttgaacgtgcaaaaaaaattaccaataatccagaaaattattatcatggattctaaaacggattaccagggatttcagtcgatgtacacgttcgtcacatctcatctacctcccggttttaatgaatacgattttgtaccagagtcctttgatcgtgacaaaacaattgcactgataatgaattcctctggatctactgggttacctaagggtgtggcccttccgcatagaactgcctgcgtcagattctcgcatgccaggtatgtcgtataacaagagattaagtaatgttgctacacacattgtagagatcctatttttggcaatcaaatcattccggatactgcgattttaagtgttgttccattccatcacggttttggaatgtttactacactcggatatttgatatgtggatttcgagtcgtcttaatgtatagatttgaagaagagctgtttttacgatcccttcaggattacaaaattcaaagtgcgttgctagtaccaaccctattttcattcttcgccaaaagcactctgattgacaaatacgatttatctaatttacacgaaattgcttctgggggcgcacctctttcgaaagaagtcggggaagcggttgcaaaacggtgagttaagcgcattgctagtatttcaaggctctaaaacggcgcgtagcttccatcttccagggatacgacaaggatatgggctcactgagactacatcagctattctgattacacccgagggggatgataaaccgggcgcggtcggtaaagttgttccattttttgaagcgaaggttgtggatctggataccgggaaaacgctgggcgttaatcagagaggcgaattatgtgtcagaggacctatgattatgtccggttatgtaaacaatccggaagcgaccaacgccttgattgacaaggatggatggctacattctggagacatagcttactgggacgaagacgaacacttcttcatagttgaccgcttgaagtctttaattaaatacaaaggatatcaggtaatgaagatttttacatgcacacacgctacaatacctgtaggtggcccccgctgaattggaatcgatattgttacaacaccccaacatcttcgacgcgggcgtggcaggtcttcccgacgatgacgccggtgaacttcccgccgccgttgttgttttggagcacggaaagacgatgacggaaaaagagatcgtggattacgtcgccagtaaatgaattcgttttacgttactcgtactacaattcttttcataggtcaagtaacaaccgcgaaaaagttgcgcggaggagttgtgtttgtggacgaagtaccgaaaggtcttaccggaaaactcgacgcaagaaaaatcagagagatcctcataaaggccaagaagggcggaaagtccaaattgtaaaatgtaactgtattcagcgatgacgaaattcttagctattgtaatattatatgcaaattgatgaatggtaattttgtaattgtgggtcactgtactattttaacgaataataaaatcaggtataggtaactaaaaa

SEQ ID NO: 12 - DNA, 10801 bp, synthetic construct
  misc_feature 1..10801: note = pAKlux2 bioluminescence expression vector for Gram-negative bacteria
  gene 466..1908: note = luxC
  gene 1921..2844: note = luxD
  gene 2893..3975: note = luxA
  gene 3990..4973: note = luxB
  gene 5152..6264: note = luxE
  source 1..10801: mol_type = other DNA
gggcaaatattatacgcaaggcgacaaggtgctgatgccgctggcgattcaggttcatcatgccgtttgtgatggcttccatgtcggcagaatgcttaatgaattacaacagtttttatgcatgcgcccaatacgcaaaccgcctctccccgcgcgttggccgattcattaatgcagctggcacgacaggtttcccgactggaaagcgggcagtgagcgcaacgcaattaatgtgagttagctcactcattaggcaccccaggctttacactttatgcttccggctcgtatgttgtgtggaattgtgagcggataacaatttcacacaggaaacagctatgaccatgattacgccaagcgcgcaattaaccctcactaaagggaacaaaagctgggtaccgggccccccctcgaggtcgacggtatcgataagcttgatatcgaattcaggcttggaggatacgtatgactaaaaaaatttcattcattattaacggccaggttgaaatctttcccgaaggtgatgatttagtgcaatccattaattttggtgataatagtgtttacctgccaatattgaatgactctcatgtaaaaaacattattgattgtaatggaaataacgaattacggttgcataacattgtcaattttctctatacggtagggcaaagatggaaaaatgaagaatactcaagacgcaggacatacattcgtgacttaaaaaaatatatgggatattcagaagaaatggctaagctagaggccaattggatatctatgattttatgttctaaaggcggcctttatgatgttgtagaaaatgaacttggttctcgccatatcatggatgaatggctacctcaggatgaaagttatgttcgggcttttccgaaaggtaaatctgtacatctgttggcaggtaatgttccattatctgggatcatgtctatattacgcgcaattttaactaagaatcagtgtattataaaaacatcgtcaaccgatccttttaccgctaatgcattagcgttaagttttattgatgtagaccctaatcatccgataacgcgctctttatctgttatatattggccccaccaaggtgatacatcactcgcaaaagaaattatgcaacatgcggatgttattgtcgcttggggagggccagatgcgattaattgggcggtagagcatgcgccatcttatgctgatgtgattaaatttggttctaaaaagagtctttgcattatcgataatcctgttgatttgacgtccgcagcgacaggtgcggctcatgatgtttgtttttacgatcagcgagcttgtttttctgcccaaaacatatattacatgggaaatcattatgaggaatttaagttagcgttgatagaaaaacttaatctatatgcgcatatattaccgaatgccaaaaaagattttgatgaaaaggcggcctattctttagttcaaaaagaaagcttgtttgctggattaaaagtagaggtggatattcatcaacgttggatgattattgagtcaaatgcaggtgtggaatttaatcaaccacttggcagatgtgtgtaccttcatcacgtcgataatattgagcaaatattgccttatgttcaaaaaaataagacgcaaaccatatctatttttccttgggagtcatcatttaaatatcgagatgcgttagcattaaaaggtgcggaaaggattgtagaagcaggaatgaataacatatttcgagttggtggatctcatgacggaatgagaccgttgcaacgattagtgacatatatttctcatgaaaggccatctaactatacggctaaggatgttgcggttgaaatagaacagactcgattcctggaagaagataagttccttgtatttgtcccataataggtaaaaagtatggaaaatgaatcaaaatataaaaccatcgaccacgttatttgtgttgaaggaaataaaaaaattcatgtttgggaaacgctgccagaagaaaacagcccaaagagaaagaatgccattattattgcgtctggttttgcccgcaggatggatcattttgctggtctggcggaatatttatcgcggaatggatttcatgtgatccgctatgattcgcttcaccacgttggattgagttcagggacaattgatgaatttacaatgtctataggaaagcagagcttgttagcagtggttgattggttaactacacgaaaaataaataacttcggtatgttggcttcaagcttatctgcgcggatagcttatgcaagcctatctgaaatcaatgcttcgtttttaatcaccgcagtcggtgttgttaacttaagatattctcttgaaagagctttagggtttgattatctcagtctacccattaatgaattgccgaataatctagattttgaaggccataaattgggtgctgaagtctttgcgagagattgtcttgattttggttgggaagatttagcttctacaattaataacatgatgtatcttgatataccgtttattgcttttactgcaaataacgataattgggtcaagcaagatgaagttatcacattgttatcaaatattcgtagtaatcgatgcaagatatattctttgttaggaagttcgcatgacttgagtgaaaatttagtggtcctgcgcaatttttatcaatcggttacgaaagccgctatcgcgatggataatgatcatctggatattgatgttgatattactgaaccgtcatttgaacatttaactattgcgacagtcaatgaacgccgaatgagaattgagattgaaaatcaagcaatttctctgtcttaaaatctattgagatattctatcactcaaatagcaatataaggactctctatgaaatttggaaactttttgcttacataccaacctccccaattttctcaaacagaggtaatgaaacgtttggttaaattaggtcgcatctctgaggagtgtggttttgataccgtatggttactggagcatcatttcacggagtttggtttgcttggtaacccttatgtcgctgctgcatatttacttggcgcgactaaaaaattgaatgtaggaactgccgctattgttcttcccacagcccatccagtacgccaacttgaagatgtgaatttattggatcaaatgtcaaaaggacgatttcggtttggtatttgccgagggctttacaacaaggactttcgcgtattcggcacagatatgaataacagtcgcgccttagcggaatgctggtacgggctgataaagaatggcatgacagagggatatatggaagctgataatgaacatatcaagttccataaggtaaaagtaaaccccgcggcgtatagcagaggtggcgcaccggtttatgtggtggctgaatcagcttcgacgactgagtgggctgctcaatttggcctaccgatgatattaagttggattataaatactaacgaaaagaaagcacaacttgagctttataatgaagtggctcaagaatatgggcacgatattcataatatcgaccattgcttatcatatataacatctgtagatcatgactcaattaaagcgaaagagatttgccggaaatttctggggcattggtatgattcttatgtgaatgctacgactatttttgatgattcagaccaaacaagaggttatgatttcaataaagggcagtggcgtgactttgtattaaaaggacataaagatactaatcgccgtattgattacagttacgaaatcaatcccgtgggaacgccgcaggaatgtattgacataattcaaaaagacattgatgctacaggaatatcaaatatttgttgtggatttgaagctaatggaacagtagacgaaattattgcttccatgaagctcttccagtctgatgtcatgccatttcttaaagaaaaacaacgttcgctattatattagctaaggagaaagaaatgaaatttggattgttcttccttaacttcatcaattcaacaactgttcaagaacaaagtatagttcgcatgcaggaaataacggagtatgttgataagttgaattttgaacagattttagtgtatgaaaatcatttttcagataatggtgttgtcggcgctcctctgactgtttctggttttctgctcggtttaacagagaaaattaaaattggttcattaaatcacatcattacaactcatcatcctgtccgcatagcggaggaagcttgcttattggatcagttaagtgaagggagatttattttagggtttagtgattgcgaaaaaaaagatgaaatgcatttttttaatcgcccggttgaatatcaacagcaactatttgaagagtgttatgaaatcattaacgatgctttaacaacaggctattgtaatccagataacgatttttatagcttccctaaaatatctgtaaatccccatgcttatacgccaggcggacctcggaaatatgtaacagcaaccagtcatcatattgttgagtgggcggccaaaaaaggtattcctctcatctttaagtgggatgattctaatgatgttagatatgaatatgctgaaagatataaagccgttgcggataaatatgacgttgacctatcagagatagaccatcagttaatgatattagttaactataacgaagatagtaataaagctaaacaagagacgcgtgcatttattagtgattatgttcttgaaatgcaccctaatgaaaatttcgaaaataaacttgaagaaataattgcagaaaacgctgtcggaaattatacggagtgtataactgcggctaagttggcaattgaaaagtgtggtgcgaaaagtgtattgctgtcctttgaaccaatgaatgatttgatgagccaaaaaaatgtaatcaatattgttgatgataatattaagaagtaccacatggaatatacctaatagatttcgagttgcagcgaggcggcaagtgaacgaatccccaggagcatagataactatgtgactggggtgagtgaaagcagccaacaaagcagcagcttgaaagatgaagggtataaaagagtatgacagcagtgctgccatactttctaatattatcttgaggagtaaaacaggtatgacttcatatgttgataaacaagaaattacagcaagctcagaaattgatgatttgattttttcgagcgatccattagtgtggtcttacgacgagcaggaaaaaatcagaaagaaacttgtgcttgatgcatttcgtaatcattataaacattgtcgagaatatcgtcactactgtcaggcacacaaagtagatgacaatattacggaaattgatgacatacctgtattcccaacatcggtttttaagtttactcgcttattaacttctcaggaaaacgagattgaaagttggtttaccagtagcggcacgaatggtttaaaaagtcaggtggcgcgtgacagattaagtattgagagactcttaggctctgtgagttatggcatgaaatatgttggtagttggtttgatcatcaaatagaattagtcaatttgggaccagatagatttaatgctcataatatttggtttaaatatgttatgagtttggtggaattgttatatcctacgacatttaccgtaacagaagaacgaatagattttgttaaaacattgaatagtcttgaacgaataaaaaatcaagggaaagatctttgtcttattggttcgccatactttatttatttactctgccattatatgaaagataaaaaaatctcattttctggagataaaagcctttatatcataaccggaggcggctggaaaagttacgaaaaagaatctctgaaacgtgatgatttcaatcatcttttatttgatactttcaatctcagtgatattagtcagatccgagatatatttaatcaagttgaactcaacacttgtttctttgaggatgaaatgcagcgtaaacatgttccgccgtgggtatatgcgcgagcgcttgatcctgaaacgttgaaacctgtacctgatggaacgccggggttgatgagttatatggatgcgtcagcaaccagttatccagcatttattgttaccgatgatgtcgggataattagcagagaatatggtaagtatcccggcgtgctcgttgaaattttacgtcgcgtcaatacgaggacgcagaaagggtgtgctttaagcttaaccgaagcgtttgatagttgatgacctgcaggtcgacggatccggggaattcctgcagcccgggggatccactagttctagagcggccgccaccgcggtggagctccaattcgccctatagtgagtcgtattacgcgcgctcactggccgtcgttttacaacgtcgtgactgggaaaaccctggcgttacccaacttaatcgccttgcagcacatccccctttcgccagctggcgtaatagcgaagaggcccgcaccgatcgcccttcccaacagttgcgcagcctgaatggcgaatggaaattgtaagcgttaatattttgttaaaattcgcgttaaatttttgttaaatcagctcattttttaaccaataggccgtactgcgatgagtggcagggcggggcgtaatttttttaaggcagttattggtgcccttaaacgcctggttgctacgcctgaataagtgataataagcggatgaatggcagaaattcgaaagcaaattcgacccggtcgtcggttcagggcagggtcgttaaatagccgcttatgtctattgctggtttaccggtttattgactaccggaagcagtgtgaccgtgtgcttctcaaatgcctgaggccagtttgctcaggctctccccgtggaggtaataattgacgatatgatcatttattctgcctcccagagcctgataaaaacggtgaatccgttagcgaggtgccgccggcttccattcaggtcgaggtggcccggctccatgcaccgcgacgcaacgcggggaggcagacaaggtatagggcggcgaggcggctacagccgatagtctggaacagcgcacttacgggttgctgcgcaacccaagtgctaccggcgcggcagcgtgacccgtgtcggcggctccaacggctcgccatcgtccagaaaacacggctcatcgggcatcggcaggcgctgctgcccgcgccgttcccattcctccgtttcggtcaaggctggcaggtctggttccatgcccggaatgccgggctggctgggcggctcctcgccggggccggtcggtagttgctgctcgcccggatacagggtcgggatgcggcgcaggtcgccatgccccaacagcgattcgtcctggtcgtcgtgatcaaccaccacggcggcactgaacaccgacaggcgcaactggtcgcggggctggccccacgccacgcggtcattgaccacgtaggccgacacggtgccggggccgttgagcttcacgacggagatccagcgctcggccaccaagtccttgactgcgtattggaccgtccgcaaagaacgtccgatgagcttggaaagtgtcttctggctgaccaccacggcgttctggtggcccatctgcgccacgaggtgatgcagcagcattgccgccgtgggtttcctcgcaataagcccggcccacgcctcatgcgctttgcgttccgtttgcacccagtgaccgggcttgttcttggcttgaatgccgatttctctggactgcgtggccatgcttatctccatgcggtaggggtgccgcacggttgcggcaccatgcgcaatcagctgcaacttttcggcagcgcgacaacaattatgcgttgcgtaaaagtggcagtcaattacagattttctttaacctacgcaatgagctattgcggggggtgccgcaatgagctgttgcgtaccccccttttttaagttgttgatttttaagtctttcgcatttcgccctatatctagttctttggtgcccaaagaagggcacccctgcggggttcccccacgccttcggcgcggctccccctccggcaaaaagtggcccctccggggcttgttgatcgactgcgcggccttcggccttgcccaaggtggcgctgcccccttggaacccccgcactcgccgccgtgaggctcggggggcaggcgggcgggcttcgcccttcgactgcccccactcgcataggcttgggtcgttccaggcgcgtcaaggccaagccgctgcgcggtcgctgcgcgagccttgacccgccttccacttggtgtccaaccggcaagcgaagcgcgcaggccgcaggccggaggcttttccccagagaaaattaaaaaaattgatggggcaaggccgcaggccgcgcagttggagccggtgggtatgtggtcgaaggctgggtagccggtgggcaatccctgtggtcaagctcgtgggcaggcgcagcctgtccatcagcttgtccagcagggttgtccacgggccgagcgaagcgagccagccggtggccgctcgcggccatcgtccacatatccacgggctggcaagggagcgcagcgaccgcgcagggcgaagcccggagagcaagcccgtagggcgccgcagccgccgtaggcggtcacgactttgcgaagcaaagtctagtgagtatactcaagcattgagtggcccgccggaggcaccgccttgcgctgcccccgtcgagccggttggacaccaaaagggaggggcaggcatggcggcatacgcgatcatgcgatgcaagaagctggcgaaaatgggcaacgtggcggccagtctcaagcacgcctaccgcgagcgcgagacgcccaacgctgacgccagcaggacgccagagaacgagcactgggcggccagcagcaccgatgaagcgatgggccgactgcgcgagttgctgccagagaagcggcgcaaggacgctgtgttggcggtcgagtacgtcatgacggccagcccggaatggtggaagtcggccagccaagaacagcaggcggcgttcttcgagaaggcgcacaagtggctggcggacaagtacggggcggatcgcatcgtgacggccagcatccaccgtgacgaaaccagcccgcacatgaccgcgttcgtggtgccgctgacgcaggacggcaggctgtcggccaaggagttcatcggcaacaaagcgcagatgacccgcgaccagaccacgtttgcggccgctgtggccgatctagggctgcaacggggcatcgagggcagcaaggcacgtcacacgcgcattcaggcgttctacgaggccctggagcggccaccagtgggccacgtcaccatcagcccgcaagcggtcgagccacgcgcctatgcaccgcagggattggccgaaaagctgggaatctcaaagcgcgttgagacgccggaagccgtggccgaccggctgacaaaagcggttcggcaggggtatgagcctgccctacaggccgccgcaggagcgcgtgagatgcgcaagaaggccgatcaagcccaagagacggcccgagaccttcgggagcgcctgaagcccgttctggacgccctggggccgttgaatcgggatatgcaggccaaggccgccgcgatcatcaaggccgtgggcgaaaagctgctgacggaacagcgggaagtccagcgccagaaacaggcccagcgccagcaggaacgcgggcgcgcacatttccccgaaaagtgccacctggattttggtcatgagattatcaaaaaggatcttcacctagatccttttaaattaaaaatgaagttttaaatcaatctaaagtatatatgagtaaacttggtctgacagttaccaatgcttaatcagtgaggcacctatctcagcgatctgtctatttcgttcatccatagttgcctgactccccgtcgtgtagataactacgatacgggagggcttaccatctggccccagtgctgcaatgataccgcgagacccacgctcaccggctccagatttatcagcaataaaccagccagccggaagggccgagcgcagaagtggtcctgcaactttatccgcctccatccagtctattaattgttgccgggaagctagagtaagtagttcgccagttaatagtttgcgcaacgttgttgccattgctacaggcatcgtggtgtcacgctcgtcgtttggtatggcttcattcagctccggttcccaacgatcaaggcgagttacatgatcccccatgttgtgcaaaaaagcggttagctccttcggtcctccgatcgttgtcagaagtaagttggccgcagtgttatcactcatggttatggcagcactgcataattctcttactgtcatgccatccgtaagatgcttttctgtgactggtgagtactcaaccaagtcattctgagaatagtgtatgcggcgaccgagttgctcttgcccggcgtcaatacgggataataccgcgccacatagcagaactttaaaagtgctcatcattggaaaacgttcttcggggcgaaaactctcaaggatcttaccgctgttgagatccagttcgatgtaacccactcgtgcacccaactgatcttcagcatcttttactttcaccagcgtttctgggtgagcaaaaacaggaaggcaaaatgccgcaaaaaagggaataagggcgacacggaaatgttgaatactcatactcttcctttttcaatattattgaagcatttatcagggttattgtctcatgagcggatacatatttgaat

SEQ ID NO: 13 - RNA, 19 nt, synthetic construct
  misc_feature 1..19: note = siMYCN-1 (MYCN siRNA cocktail)
  source 1..19: mol_type = other RNA
cggagatgctgcttgagaa

SEQ ID NO: 14 - RNA, 19 nt, synthetic construct
  misc_feature 1..19: note = siMYCN-2 (MYCN siRNA cocktail)
  source 1..19: mol_type = other RNA
cggagttggtaaagaatga

SEQ ID NO: 15 - RNA, 19 nt, synthetic construct
  misc_feature 1..19: note = siMYCN-3 (MYCN siRNA cocktail)
  source 1..19: mol_type = other RNA
cagcagttgctaaagaaaa

SEQ ID NO: 16 - RNA, 21 nt, synthetic construct
  misc_feature 1..21: note = MYCN siRNA (sense)
  source 1..21: mol_type = other RNA
cagcagttgctaaagaaaatt

SEQ ID NO: 17 - RNA, 21 nt, synthetic construct
  misc_feature 1..21: note = MYCN siRNA (antisense)
  source 1..21: mol_type = other RNA
ttttctttagcaactgctgtt

SEQ ID NO: 18 - RNA, 19 nt, synthetic construct
  misc_feature 1..19: note = MYCN siRNA (exon 2)
  source 1..19: mol_type = other RNA
tgatctgcaagaacccaga

SEQ ID NO: 19 - DNA, 15 bp, synthetic construct
  misc_feature 1..15: note = MYCN ASO
  source 1..15: mol_type = other DNA
aacgttgaggggcat

SEQ ID NO: 20 - RNA, 24 nt, synthetic construct
  misc_feature 1..24: note = RAS miRNA (wild-type sense Syn-miR-143)
  source 1..24: mol_type = other RNA
ggtctctacgtcgtgacgtggagt

SEQ ID NO: 21 - RNA, 24 nt, synthetic construct
  misc_feature 1..24: note = RAS miRNA (wild-type antisense Syn-miR-143)
  source 1..24: mol_type = other RNA
tgagatgaagcactgtagctcagg

SEQ ID NO: 22 - RNA, 24 nt, synthetic construct
  misc_feature 1..24: note = RAS miRNA (F/Ome sense Syn-miR-143)
  source 1..24: mol_type = other RNA
ggtctctacgtcgtgacgtggagt

SEQ ID NO: 23 - RNA, 24 nt, synthetic construct
  misc_feature 1..24: note = RAS miRNA (F/Ome antisense Syn-miR-143)
  modified_base 1: mod_base = OTHER; note = 2'-deoxy-fluoro
  modified_base 2: mod_base = OTHER; note = 2'-O-methyl
  misc_feature 23: note = n is dT
  source 1..24: mol_type = other RNA
  modified_base 3: mod_base = OTHER; note = 2'-deoxy-fluoro
  modified_base 5: mod_base = OTHER; note = 2'-deoxy-fluoro
  modified_base 7: mod_base = OTHER; note = 2'-deoxy-fluoro
  modified_base 9: mod_base = OTHER; note = 2'-deoxy-fluoro
  modified_base 11: mod_base = OTHER; note = 2'-deoxy-fluoro
  modified_base 13: mod_base = OTHER; note = 2'-deoxy-fluoro
  modified_base 15: mod_base = OTHER; note = 2'-deoxy-fluoro
  modified_base 17: mod_base = OTHER; note = 2'-deoxy-fluoro
  modified_base 19: mod_base = OTHER; note = 2'-deoxy-fluoro
  modified_base 21: mod_base = OTHER; note = 2'-deoxy-fluoro
  modified_base 23: mod_base = OTHER; note = 2'-deoxy-fluoro
  modified_base 24: mod_base = OTHER; note = 2'-deoxy-fluoro
  modified_base 4: mod_base = OTHER; note = 2'-O-methyl
  modified_base 6: mod_base = OTHER; note = 2'-O-methyl
  modified_base 10: mod_base = OTHER; note = 2'-O-methyl
  modified_base 8: mod_base = OTHER; note = 2'-O-methyl
  modified_base 12: mod_base = OTHER; note = 2'-O-methyl
  modified_base 14: mod_base = OTHER; note = 2'-O-methyl
  modified_base 16: mod_base = OTHER; note = 2'-O-methyl
  modified_base 18: mod_base = OTHER; note = 2'-O-methyl
  modified_base 20: mod_base = OTHER; note = 2'-O-methyl
  modified_base 22: mod_base = OTHER; note = 2'-O-methyl
  misc_feature 24: note = n is dT
tgagatgaagcactgtagctcann

SEQ ID NO: 24 - RNA, 25 nt, synthetic construct
  misc_feature 1..25: note = siR-KRAS
  source 1..25: mol_type = other RNA
aatgcatgacaacactggatgaccg

SEQ ID NO: 25 - RNA, 25 nt, synthetic construct
  misc_feature 1..25: note = siR-HRAS
  source 1..25: mol_type = other RNA
ccatccagctgatccagaaccattt

SEQ ID NO: 26 - RNA, 38 nt, synthetic construct
  misc_feature 1..38: note = RAS siRNA
  source 1..38: mol_type = other RNA
ggactctgaagatgtacctaggtacatcttcagagtcc

SEQ ID NO: 27 - DNA, 17 bp, synthetic construct
  misc_feature 1..17: note = Mutated K-RAS ASO
  source 1..17: mol_type = other DNA
ctacgccacaagctcca

SEQ ID NO: 28 - DNA, 110 bp, Homo sapiens
  misc_feature 1..110: note = MIR34A
  source 1..110: mol_type = other DNA
ggccagctgtgagtgtttctttggcagtgtcttagctggttgttgtgagcaatagtaaggaagcaatcagcaagtatactgccctagaagtgctgcacgttgtggggccc

SEQ ID NO: 29 - RNA, 19 nt, synthetic construct
  misc_feature 1..19: note = BCL2 3p-siRNA (sense)
  source 1..19: mol_type = other RNA
gcatgcggcctctgtttga

SEQ ID NO: 30 - RNA, 19 nt, synthetic construct
  misc_feature 1..19: note = BCL2 3p-siRNA (antisense)
  source 1..19: mol_type = other RNA
cgtacgccggagacaaact

SEQ ID NO: 31 - DNA, 18 bp, synthetic construct
  misc_feature 1..18: note = BCL2 ASO
  source 1..18: mol_type = other DNA
tctcccagcgtgcgccat

SEQ ID NO: 32 - RNA, 21 nt, synthetic construct
  misc_feature 1..21: note = PLK1 siRNA (sense)
  modified_base 4: mod_base = OTHER; note = 2'-O-methyl
  source 1..21: mol_type = other RNA
  modified_base 10: mod_base = OTHER; note = 2'-O-methyl
  modified_base 14: mod_base = OTHER; note = 2'-O-methyl
  modified_base 18: mod_base = OTHER; note = 2'-O-methyl
agatcaccctccttaaatatt

SEQ ID NO: 33 - RNA, 21 nt, synthetic construct
  misc_feature 1..21: note = PLK1 siRNA (antisense)
  modified_base 8: mod_base = OTHER; note = 2'-O-methyl
  source 1..21: mol_type = other RNA
  modified_base 17: mod_base = OTHER; note = 2'-O-methyl
tatttaaggagggtgatcttt

SEQ ID NO: 34 - RNA, 21 nt, synthetic construct
  misc_feature 1..21: note = PLK1 siRNA
  source 1..21: mol_type = other RNA
aagggcggctttgccaagtgc

SEQ ID NO: 35 - DNA, 20 bp, synthetic construct
  misc_feature 1..20: note = PLK1 ASO
  source 1..20: mol_type = other DNA
accagtccggaggggagggc

SEQ ID NO: 36 - RNA, 22 nt, synthetic construct
  misc_feature 1..22: note = Purified siRNA
  misc_feature 21: note = n is dT
  source 1..22: mol_type = other RNA
  misc_feature 22: note = n is dT
ggtgccagttctccaagattnn

SEQ ID NO: 37 - protein, 37 aa, synthetic construct
  REGION 1..37: note = LL-37
LLGDFFRKSKEKIGKEFKRIVQRIKDFLRNLVPRTES

SEQ ID NO: 38 - DNA, 6455 bp, Homo sapiens
  misc_feature 1..6455: note = MYCN
  source 1..6455: mol_type = other DNA
aggctgtgacagtcatctgtctggacgcgctgggtggatgcggggggctcctgggaactgtgttggagccgagcaagcgctagccaggcgcaagcgcgcacagactgtagccatccgaggacacccccgcccccccggcccacccggagacacccgcgcagaatcgcctccggatcccctgcagtcggcgggaggtaaggagcagggcttgcaaaccgcccggcgcccagggaagcgacgagcgccggggcaaggcaagccctggacgggattgcgacgtgcgcaccgggcgccctaatatgcccgggggactgtttctgcttccgaaacaaaaccatctctgggttttcccagaaaagccagttccagccccgaaggcatcctggctagaggagacccgccctaatccttttgcagcccttaccggggggagtaatggcttctgcgaaaagaaattccctcggctctagaagatctgtctgtgtttgagctgtcggagagccggtgcgtccccaccccaggctggggttcttctccaaagggtgcccctggaggaagaagagggggggattaggcagggcgaggccgccgcggtcgcaatctgggtcacggctgctccagcttggaggagaggcggctctcccggcgaccctcctcgcgcgggcgcccctgccattcccgggaacaggggctcagcctctccctccctggaagaggacgttgtcgtgggtttggaagagcaggggtgggcttagagagcttccaattaagctattggcaggagtatccctgcagcgggtgaatgccgaggggcgtttgctcaaatttggggaggggaaggatttgtggatatgggtgtctgttgttggtctctgtctagagaaaggcttttttttatttgcaaagttttctaaatcccctgctatcatttgcactcctgaggttgcatttttacaaagggggtagaaggtactccaaataccattcccggtagctgggtcggagagcctggggcttcccctgagcagccggccccacaccgctgcgagtgcggttgtctgcgtgctcgtgagagctagaattctgcagccaggaacagccccctcccccaggcagtgccttgtgtgaatgaaatggcagtttccaaagttgcggagcctcgccaccaccccctgcatctgcatgccccctcccaccccctgtcgtagacagcttgtacacaaaaggagggcgggagggagggagcgagaggcacaacttcctccaccttcgggagcagtgggcagagtggggggcttggagggaagattggggaacctggttagagggggcgcccattgcctatcccctcggtctgccccgtttgcccaccctctccggtgtgtctgtcggttgcagtgttggaggtcggcgccggcccccgccttccgcgccccccacgggaaggaagcacccccggtattaaaacgaacggggcggaaagaagccctcagtcgccggccgggaggcgagccgatgccgagctgctccacgtccaccatgccgggcatgatctgcaagaacccagacctcgagtttgactcgctacagccctgcttctacccggacgaagatgacttctacttcggcggccccgactcgacccccccgggggaggacatctggaagaagtttgagctgctgcccacgcccccgctgtcgcccagccgtggcttcgcggagcacagctccgagcccccgagctgggtcacggagatgctgcttgagaacgagctgtggggcagcccggccgaggaggacgcgttcggcctggggggactgggtggcctcacccccaacccggtcatcctccaggactgcatgtggagcggcttctccgcccgcgagaagctggagcgcgccgtgagcgagaagctgcagcacggccgcgggccgccaaccgccggttccaccgcccagtccccgggagccggcgccgccagccctgcgggtcgcgggcacggcggggctgcgggagccggccgcgccggggccgccctgcccgccgagctcgcccacccggccgccgagtgcgtggatcccgccgtggtcttcccctttcccgtgaacaagcgcgagccagcgcccgtgcccgcagccccggccagtgccccggcggcgggccctgcggtcgcctcgggggcgggtattgccgccccagccggggccccgggggtcgcccctccgcgcccaggcggccgccagaccagcggcggcgaccacaaggccctcagtacctccggagaggacaccctgagcgattcaggtaaagaccgaactcgggtccggctgcctccctggggcactggaccccgggtcgcgtcccctttgttagtgctcgtatgtcttggcctggggagcattttggaggcagtgctaggggcagagaggtcctgtttcccccaagtctctcctcggggtaaagagaaggggctgagagaatgccgttgcaaaaggggtgctctccaattctcgccttcactaaagttccttccaccctctcctggggagccctcctctaggccatcacgggccctcacccggtcccccacctctcttttgcagcgcagtctgaggaataaaattggagaaagttggtggctaaaccgggtgggggtttagggggttgctgggtgcactgcctggacagaaacctgttagcgcaggggtgaaagggactctctggcccaggtcaggggagggaaagacatcccgagaagattcaagggctgtgcaaagccctgtttaaggcgcaggaacttataggagggttgcacagatggctagagccgattttctattctttttctttttctttttttttttttttcaaatgtcggtacctttcccttcccccatcctcggtgggtggtgggctatttgctcctggtgcgtggccagcaggcggcgatatgcgaggccagcaggcgggcccgggatctgaaaggctgggggtggtgggggcaccctccctccctccattcagcagctggctgcaagtgcaacagcagttgtgtacattctcagggggcctcctctttccagtgtgcagtggaaactggctgtagttttgtcttccagcctgaattccaggcctaatttgagatgtgagttgtatctgtaacccagtgcccttgaaggtgagggcaggcactcagcagcctctccaggaaggctcacatcctgggaggactcactgattagttctattgtgttcatttgtctgtgtcttaagctgaagggaagagttaaaaccaagcctttccctgggggtctggatgaacagaactcaacccaaagagtggcattgccttgtccttggagcagggagctgggaccccccttggactttgaaaaccagtgttttcagaatgcaggtggataacaagcctaaatttacttctgggctgaggagagatctttgaggctcctggaaggaaacttggtgataagcctccagtttgaaacggctctgtccctttaatgtctgtgccttgacagcttttggtgaggaagcacttccttccaacagctgtcttcttggcagaaaaccaaaacattggcttaaagggacccacagactggaacagcctcacatttcggctttagaacaaatcccacaattgttcagctttccggtccccttcagatcaagcagaagatatgttttgattttcatgcttgtattttaaacaataattttctaccccagcgtggtagtcaatgaggagagaggggaagaatgcgcacatgatgctacacgtttctgttgttgctgttattattggtggctttgaggagagctgctcccatttgggggtttataccaactgtggattatggctttgtcattaagatttgatctttgttaaatgaaaaactgtttattgtataaaactcaggtttgtggacgaaaagttgttttttttcttcagttaattaaattgttcctcaagtttgtttaaggacttaaaatcaaacacaaccatgtgtaaactgctaaatgaggctcctaaaatgagaggcctcaactctttaagtgtggagctagaaatgtaaataagtccacagggcagactggtgattatgataaaagctaccatttactgagcatctgtctactaggctcagctctatgctaagtctacatgttatctgtcaaagtggtatcatccccatttaatagctgaggaaacagaggcttagaaaggctgggtaacttgaccagggtcatgcaactagtctgcggtggagccaggattctgtctgaccctaaaggccaagttctttatatttatttctaccacctgctaaagtcttgaatggaggctgaaagcacagttggggtatggggaagaaaaatatatatacatacatatatgtatatgtatgtatgtatgtatggggggttgttttgtttttgtttttgataaggagttttgctcttgttgcccaggctggagtgcagtggtatgatctgggctcactgcaacctccgcctcccgggttcaagtcattctcctgcctcagcctcccgagtagctgggattaccggagcatgccaccacacccagcaaagttttgtatttttagtagagacagggtttcaccatgttggccaggctgatcttgaactcctcatctcaggtgatctgcccgcctccgcttcccaaagtgctgggattacaggtgtgagtcaccgcgtccggcctacagatatatttaatttaaagagatctaaaacaaatacaaaactgtccacatctatgttgatggacccataaaaatagcagtctgccagggtctgccggaagagacagataagcatacatattaacatggatatatatgtgaatttcattcaaatggttctcacatgagagtaactagcatctttctctcagatgatgaagatgatgaagaggaagatgaagaggaagaaatcgacgtggtcactgtggagaagcggcgttcctcctccaacaccaaggctgtcaccacattcaccatcactgtgcgtcccaagaacgcagccctgggtcccgggagggctcagtccagcgagctgatcctcaaacgatgccttcccatccaccagcagcacaactatgccgccccctctccctacgtggagagtgaggatgcacccccacagaagaagataaagagcgaggcgtccccacgtccgctcaagagtgtcatccccccaaaggctaagagcttgagcccccgaaactctgactcggaggacagtgagcgtcgcagaaaccacaacatcctggagcgccagcgccgcaacgaccttcggtccagctttctcacgctcagggaccacgtgccggagttggtaaagaatgagaaggccgccaaggtggtcattttgaaaaaggccactgagtatgtccactccctccaggccgaggagcaccagcttttgctggaaaaggaaaaattgcaggcaagacagcagcagttgctaaagaaaattgaacacgctcggacttgctagacgcttctcaaaactggacagtcactgccactttgcacattttgattttttttttaaacaaacattgtgttgacattaagaatgttggtttactttcaaatcggtcccctgtcgagttcggctctgggtgggcagtaggaccaccagtgtggggttctgctgggaccttggagagcctgcatcccaggatgctgggtggccctgcagcctcctccacctcacctccatgacagcgctaaacgttggtgacggttgggagcctctggggctgttgaagtcaccttgtgtgttccaagtttccaaacaacagaaagtcattccttctttttaaaatggtgcttaagttccagcagatgccacataaggggtttgccatttgatacccctggggaacatttctgtaaataccattgacacatccgccttttgtatacatcctgggtaatgagaggtggcttttgcggccagtattagactggaagttcatacctaagtactgtaataatacctcaatgtttgaggagcatgttttgtatacaaatatattgttaatctctgttatgtactgtactaattcttacactgcctgtatactttagtatgacgctgatacataactaaatttgatacttatattttcgtatgaaaatgagttgtgaaagttttgagtagatattactttatcactttttgaactaagaaacttttgtaaagaaatttactatatatatatgcctttttcctagcctgtttcttcctgttaatgtatttgttcatgtttggtgcatagaactgggtaaatgcaaagttctgtgtttaatttcttcaaaatgtatatatttagtgctgcatcttatagcactttgaaatacctcatgtttatgaaaataaatagcttaaaattaaa

SEQ ID NO: 39 - DNA, 3335 bp, Homo sapiens
  misc_feature 1..3335: note = H-RAS
  source 1..3335: mol_type = other DNA
aggcccgcccgagtctccgccgcccgtgccctgcgcccgcaacccgagccgcacccgccgcggacggagcccatgcgcggggcgaaccgcgcgcccccgcccccgccccgccccggcctcggccccggccctggccccgggggcagtcgcgcctgtgaacggtgagtgcgggcagggatcggccgggccgcgcgccctcctcgcccccaggcggcagcaatacgcgcggcgcgggccgggggcgcggggccggcgggcgtaagcggcggcggcggcggcggcggcgggtgggtggggccgggcggggcccgcgggcacaggtgagcgggcgtcgggggctgcggcgggcgggggccccttcctccctggggcctgcgggaatccgggccccacccgtggcctcgcgctgggcacggtccccacgccggcgtacccgggagcctcgggcccggcgccctcacacccgggggcgtctgggaggaggcggccgcggccacggcacgcccgggcacccccgattcagcatcacaggtcgcggaccaggccgggggcctcagccccagtgccttttccctctccgggtctcccgcgccgcttctcggccccttcctgtcgctcagtccctgcttcccaggagctcctctgtcttctccagctttctgtggctgaaagatgcccccggttccccgccgggggtgcggggcgctgcccgggtctgccctcccctcggcggcgcctagtacgcagtaggcgctcagcaaatacttgtcggaggcaccagcgccgcggggcctgcaggctggcactagcctgcccgggcacgccgtggcgcgctccgccgtggccagacctgttctggaggacggtaacctcagccctcgggcgcctccctttagcctttctgccgacccagcagcttctaatttgggtgcgtggttgagagcgctcagctgtcagccctgcctttgagggctgggtcccttttcccatcactgggtcattaagagcaagtgggggcgaggcgacagccctcccgcacgctgggttgcagctgcacaggtaggcacgctgcagtccttgctgcctggcgttggggcccagggaccgctgtgggtttgcccttcagatggccctgccagcagctgccctgtggggcctggggctgggcctgggcctggctgagcagggccctccttggcaggtggggcaggagaccctgtaggaggaccccgggccgcaggcccctgaggagcgatgacggaatataagctggtggtggtgggcgccggcggtgtgggcaagagtgcgctgaccatccagctgatccagaaccattttgtggacgaatacgaccccactatagaggtgagcctggcgccgccgtccaggtgccagcagctgctgcgggcgagcccaggacacagccaggatagggctggctgcagcccctggtcccctgcatggtgctgtggccctgtctcctgcttcctctagaggaggggagtccctcgtctcagcaccccaggagaggagggggcatgaggggcatgagaggtaccagggagaggctggctgtgtgaactccccccacggaaggtcctgagggggtccctgagccctgtcctcctgcaggattcctaccggaagcaggtggtcattgatggggagacgtgcctgttggacatcctggataccgccggccaggaggagtacagcgccatgcgggaccagtacatgcgcaccggggagggcttcctgtgtgtgtttgccatcaacaacaccaagtcttttgaggacatccaccagtacaggtgaaccccgtgaggctggcccgggagcccacgccgcacaggtggggccaggccggctgcgtccaggcaggggcctcctgtcctctctgcgcatgtcctggatgccgctgcgcctgcagcccccgtagccagctctcgctttccacctctcagggagcagatcaaacgggtgaaggactcggatgacgtgcccatggtgctggtggggaacaagtgtgacctggctgcacgcactgtggaatctcggcaggctcaggacctcgcccgaagctacggcatcccctacatcgagacctcggccaagacccggcaggtgaggcagctctccaccccacagctagccagggacccgccccgccccgccccagccagggagcagcactcactgaccctctcccttgacacagggcagccgctctggctctagctccagctccgggaccctctgggaccccccgggacccatgtgacccagcggcccctcgcgctgtaagtctcccgggacggcagggcagtgagggaggcgagggccggggtctgggctcacgccctgcagtcctgggccgacacagctccggggaaggcggaggtccttggggagagctgccctgagccaggccggagcggtgaccctggggcccggcccctcttgtccccagagtgtcccacgggcacctgttggttctgagtcttagtggggctactggggacacgggccgtagctgagtcgagagctgggtgcagggtggtcaaaccctggccagacctggagttcaggagggccccgggccaccctgacctttgaggggctgctgtagcatgatgcgggtggccctgggcacttcgagatggccagagtccagcttcccgtgtgtgtggtgggcctggggaagtggctggtggagtcgggagcttcgggccaggcaaggcttgatcccacagcagggagcccctcacccaggcaggcggccacaggccggtccctcctgatcccatccctcctttcccagggagtggaggatgccttctacacgttggtgcgtgagatccggcagcacaagctgcggaagctgaaccctcctgatgagagtggccccggctgcatgagctgcaagtgtgtgctctcctgacgcaggtgagggggactcccagggcggccgccacgcccaccggatgaccccggctccccgcccctgccggtctcctggcctgcggtcagcagcctcccttgtgccccgcccagcacaagctcaggacatggaggtgccggatgcaggaaggaggtgcagacggaaggaggaggaaggaaggacggaagcaaggaaggaaggaagggctgctggagcccagtcaccccgggaccgtgggccgaggtgactgcagaccctcccagggaggctgtgcacagactgtcttgaacatcccaaatgccaccggaaccccagcccttagctcccctcccaggcctctgtgggcccttgtcgggcacagatgggatcacagtaaattattggatggtcttga

SEQ ID NO: 40 - DNA, 12438 bp, Homo sapiens
  misc_feature 1..12438: note = N-RAS
  source 1..12438: mol_type = other DNA
gaaacgtcccgtgtgggaggggcgggtctgggtgcggcctgccgcatgactcgtggttcggaggcccacgtggccggggcggggactcaggcgcctggggcgccgactgattacgtagcgggcggggccggaagtgccgctccttggtgggggctgttcatggcggttccggggtctccaacatttttcccggctgtggtcctaaatctgtccaaagcagaggcagtggagcttgaggtaagtttatctcatgcatagtgttcggctttgggctgtggaatgttcaggcgtttcactgatgccagaaatggagcagaatctatcagctggagacaaaggccttgggcgggggtccttccatttggtgcctacgtggggagatctttggagacagaagggagaatgggaaggagttgcggcctggaggcttcctgctagagctgagaagccttcggggagtaataggaagggggatttccattgcttaggctgagggcggggcccaaggactgttgaaaaatagctaaggatgggggttgctagaaaactactccagaagtgtgaggccgatattaatccggtgtttttgcgttctctagtcactttaagaaccaaatggaaggtcacactagggttttcatttccattgattatagaaagctttaaagtactgtagatgtggctcgccaattaaccctgattactggtttccaacaggttcttgctggtgtgaaatgactgagtacaaactggtggtggttggagcaggtggtgttgggaaaagcgcactgacaatccagctaatccagaaccactttgtagatgaatatgatcccaccatagaggtgaggcccagtggtagcccgctgacctgatcctgtctctcacttgtcggatcatctttacccatattctgtattaaaggaataagaggagagaaagtaaaaagttattttgggtatacattcagttatgcaataagcttaacgtgtttatagagaacagttcatttttattagctgctgaagtttctaaaacctgtccagtttttaacagttctgtaaactattgcaaactcagtgttgagttcattcatgagtttcttcatatataacagctctattacatgagaaacacaggccatagtagcgagactgtctgattgtatgggagataataggatggagataaaggattcagagatgagtgttcttcaatatttatttattagctagttgaagcagctgagaccagatgattggagtagcaagaacttgagatttttagtctttatgcctaggattttggtccctgtttgcagtttatttagttgtgtgatattgagcaactgaatctctcccaacctcattttcctcatgttttaaattaccataaacttgtcctgcctaccacacagggatgttatggaaagttaaataatatatttaagttatttatgaatggtaaagcactatgtaatagtacttagggattctattgttattatgagagttcatggtacagattgtcttcagtaagtggcacctaaggctctttaaataaagggttttgccggacacggtggctcacgcctgtaatcccagcactttgggaggctgaggcaggcggatcacaaggtcaggagttcaagaccagcctgatcaacatggtgaaaccccgtctctactaaaaatacaaaaattagctgggtgtggtggcaggcacctgtaatcccagctactcaggaggctgaggcaggagaatcgcttgaaccagaggcagagggtgcagtgagccgagatcacaccacagacctccagcctgggcaacagagcgagacttcgtctcaaaaaataaataaatagataaataaataaagggttttgtaattttgttcagtttagaaatgcctaactttagagattattttaatcaacacctggcctccctaccatctggctactcgtgtttaattgatgaaaactaactctaatgtagccactataaaaaattggttgctaacccttggcaaaatctttattttgagcttaacagctttaatattttacatgaaatgtttaatattttaattaaatatttttaaatgtttgatttattgagcaatttacataagtaaaatacataaattttatgtctacagcccagtgctttttgcgtttctatatagtcatgtagctaccacccagataacagtatagagcacttccagtactccagagagttctccaagtgtgatgacattaaaatacaagtaaaagtcctgttgccataaaaccaaaatgaaagtattttttatatgatctatgcatgtttgtcttcctgagaaattaaacataactataccttgtttggaacctttaagaatttgattcaggaatatttcccaaaggtacatctgtcatgataaaaaaaaaaccttctctgaaacaaaggtatttgtatatttagtcataaacacaaatgatgtatatagggccaggttataattggtggaggtatgtttagatttctttaagtaaaataaacagcacaaataaaacagtccagttcatagcttagtgaaatacactgggtacttaatctgtagcctcctggctgcagtagagttgtcatttgagttactgtgttttcttaatcttttccaggaacacagtgaccatatttcttttctgcaggcatatagaatttggtgggttttcttttatgtagggtgatattggatactttttgtttgtgattatatattagcaatttgagggacaaaccagataggcagaaatgggcttgaatagttagatgcttatttaaccttggcaatagcattgcattccctgtggtttttaataaaaattgaacttccctccctccctgcccccttaccctccacacccccaggattcttacagaaaacaagtggttatagatggtgaaacctgtttgttggacatactggatacagctggacaagaagagtacagtgccatgagagaccaatacatgaggacaggcgaaggcttcctctgtgtatttgccatcaataatagcaagtcatttgcggatattaacctctacaggtactaggagcattattttctctgaaaggatgatctttgtgttctgaatctttatggggaaatgaggttaccacactagggaagatagagctttttaattatgggaagagttggttttaggttgtttgacattgagaatctagggtaattactgaaagttaatactggaatttattttacataatatactgttactataaagtttgataatacataagtgaagcttgctactgggaatgacttggaaccagagttgttgtaattagagatcacgaaggaatttcagagaggaaaacatctccaagaaacatctttcagtatgtaatggaaaagataggccaggcacagtggctcacacctggaatgtcagtgctttgggaggccaaggcgggaggatcactttcagcccaggagttggagaccagcctgggcaacagagcaagaccctgtctctacaaaaataaaaataaaaaaattagtcacacatggtggcagctactcgggaggcagaggtgggaggatcacgtgagctcaggaggtcgaggcatgctcactccactgcactgctgcactccagcctaatcaacagagcaagattctgtctccaaaaaaaataaaaaataaaatgataggagtaagcaaataggaagtccataaagatgaaaacaaagcaagggaacataaagatagactttgtccatagaaccataaagtttcaaagctagattggaccataaaaattctagtacaatattcttattttgcagaatcagaaacagagttcagaatgtcgtttgttaggttttggagtcaggattgttattagtagcagagccaggaccaaaaacccaaagctcctttttcttagcacagtgttcttaaacagaataatataatggttaagaatgagaactctgcctggattgaaacctagctctgtttattagcgacgtgactcaggggctatgtggctttcctaacctataatatggaaataataatacctacctcatagagttgtgaagattacagttttaataaatacgcaaatcactcagaatagtgcctggcacacagtaaatgctacttaagtgttctgcctaaaggcttgagtcttggcttattttctatccatgtgaagatgtctgctctcaaaagcagattggtccaacactgaattcaagtgttcttttcctaacctgttgtacttcccattttttttttgtctaaaagtaatagcagtacttaataaaatgcccacacttggcatgcatctaataaatgttttttgaatttctagaagtcatttttcttctttcttacaagaaatttattcatttttctatatgccttagctcaaaccaaagagtatttaaaacatcttatgaaaatgcatatagtagagcaagataagattaatgaaaaataggcttaagtgagaccaaaaaaataagggtaaaataaacaaatttaggagtgagcatattctgtgattgtgcatgaagttccagtggctttctaaaggtggactacaaatttggtcactgttgtgaaaaggaaagtagccagctgaaagattcagtatctgtatgctgaaagccgttaagttgctcggactagaaggaaattttcccatggatcctcaaagaggcttgtttaatgtaaaaatcagtagtaacctgacagtgacatggtccaggtactttaggctgtcttatcccttaatgtaggctattaccatcaagcacagttttgcaaatagccagtggaatgtagttcagatacatgactttgtgggtaatccaggggtagagactaaaacagtactgtgcagtatgtggttatttacagttaattaagattaaataaaatttaaaaattagttccttgactaccaaatgctcaatagccactagtaggtaccatgttgaacagtacagatatagaccatttccatcatcacataaagtactgttggattgtgttggtcaagacaatctaaagcaattgtttcccaggtgtgctgtgtggtgtgccttacatgtcattgaaaggggtgctgtcaggagttctagatgcttcagcctccctttactaagagcagttcttatgttttctattttatcgcttgggcttccagatacaatgttttgttttaggtttgttttttttgtttgtttgtttttttttttttgagacggagttttgctctggttgcccaagctggatggagtacggtggtgcgatcgcggctcactgcaacctccgcctcccgggttcgagagattctcctgcctcagcttcccgagtagctggaattacaggcgtccaccaccatgcctgactaattttttttgtatttttagtagacttggggtttcaccatgttggccgggctggtttcaaactcctgacctcaggtgatccacccgcctcggcctcccagagggctgggattacaggtgtgaaccaccgtgcccggcctgttttagttttttagagatggagtctccctctgttgcccaagccagagtgcggtggcatgacactctcagggttcaacctctcagggatcaagggatcctcccacctcagcttcctgagtagctggaaccacaggcacatgtgccaccatgcccagctaatttttgtattttttgtagaagcaaggtttcaccatgttgcccaggctggtctcggactcctaggtcaagtgatcctcccacctcaatctcctagagtgctaagactataggcgggagtcaccatgcccagcttcatctacaatttatttgaagaaaatgtttgagcaccacccatcttgaaaagtgatagactgccttccattaaatactgtcacacctagttatttagcagcagtgagcttcactttttatactttagaccttaatctaaagggtgatttctagttgccagttaaatccagagccaagctctttggagaatccaggagcctcactaggtcatgtatcaggataaaatacccatccactcccattagaaggtgagcttgtacttatggcttcctgatggctgctgcaacaagtctaaagcagtctccttagtatacaatgtcttctctaagtggtagaaaaaagcaaaaatactacaagttaatagggctacataaaatttgctagtttcttttttgccctagccatttattccttcctgaaatcttgtctctctctcgctctctctttctctcgctctcactttctttctctttttcttttctcttttcttttctttcttccctttcttttctttcttttttcctgttgcccaggctggagtgcagtggaacaattatggctcactgcagccttgacctttctggacccaggtgatcctcccacctcagtctcccaattagctgggactacaggcatgcgccaccacacccagctataatatatattgtatatatattttttatttataaatatatataaatatatatttatatgtgtaaattatatatatttatatattataaattatatataaatatatatttatatataatatatataatatatatttatttttatatattttatatatattttttggggggggttgggggggatggagtctcactctgtcgcccaggctagagtgtagtggcgtgatcttggctcactgcaatcttcgcctcccaggttcaagcgattctcctgcctcagcttcccgagtagctgggactataggcgcctgccaccacacctggctaatttttgtatttttagtagagatggggtttcaccatattggccaggctggtcttcaactcctgaccttgtgatctgcccacctcaacctcccaaagtgctgggaatacaggcatgagccactgcacccagcctaatctttgtatttttttgtagagaccgggttttgccatgttgcccaggctaatctcaaactcctgggttcaagcagtctgccctcctcagcctcccaaagtgctgagattgcaggcatgagccactgtacccagcctaatcttgtttttcttatgttctgataatatattcccgtttttagggagcagattaagcgagtaaaagactcggatgatgtacctatggtgctagtgggaaacaagtgtgatttgccaacaaggacagttgatacaaaacaagcccacgaactggccaagagttacgggattccattcattgaaacctcagccaagaccagacaggtatggtacagctttcagcatttgtgcaagagtttgcatcagttgattaactctggtagagatgtgatccatattcatattctttgttgttatgcatttttttcatttttatttttttattttttatttttttttaggcagagtctcactctatcttctaagctggagtgcagtggtgtgatctcagctcactgcagcctctgtctcttgggttcaagtgattctcctgcctcagcctcccaagtagctgggactacgggcacatcatcatgcccggctaatttttgtacttttagtagagacagggttttaccatgttgcccaggctggtctcgaactcctggcctcaagcaatcctcccacctgggcctcccagagtgctgggattacaggtgtgagccaccacgcccagcctgttgttaggcatttttagtagtgttctttttcttaacgcttgtttaaacccaaaatgaacttactaatattctgttatggcatgtttactcctgcattaacatccacaaatatttcttgggaagatccttgactaaaaatatttataaacattagttatttctctgtcaacaccagcccgtttatggcttaagcctcctgaatggagtctttagtttaatgtagttttgttccgtgtttctcacattacccttttcctttgcatgaatgtttatttggcaaaatgtgccatttttatatcagcctgttcttgtgattcaataggaatgtgaaatttagtgttctcttccttaaatcaccatattttattttatcagctattcgtttagtaattggaatcttatgtccacataaagagatacaaatgcaagagagcttataatttggattgtgtccgttgagctagctctctcattttttttcattttttccttttatagggtgttgaagatgctttttacacactggtaagagaaatacgccagtaccgaatgaaaaaactcaacagcagtgatgatgggactcagggttgtatgggattgccatgtgtggtgatgtaacaaggtgagcatatggtttcttggcataattacaaatcttagtatatagtattgggcaatttggaggagtgctggtgttattgtctatatgttttttgagtttctgcctatcctcttctgcacattttccatatgacaccctttctgaaagtactgaggtctaaagtgtttaaaacatttgattattccacaggtatctttatatttttggtaacattagaaattataagacattatttatgaaatgtaggcataccctattcctggcaatgaccaggaatttgaaggatcactactttgaaactagttaataaggacatggtttctgttctttttttacagatacttttaaagttttgtcagaaaagagccactttcaaggtaggacaagtttggaaatgtattctcattcctgttaattttgtatatttgtttttcttatactctgaatgtgtcacttatacaaattctgtttctatttcagctgcactgacaccctggtcctgacttccctggaggagaagtattcctgttgctgtcttcagtctcacagagaagctcctgctacttccccagctctcagtagtttagtacaataatctctatttgagaagttctcagaataactacctcctcacttggctgtctgaccagagaatgcacctcttgttactccctgttatttttctgccctgggttcttccacagcacaaacacacctctgccaccccaggtttttcatctgaaaagcagttcatgtctgaaacagagaaccaaaccgcaaacgtgaaattctattgaaaacagtgtcttgagctctaaagtagcaactgctggtgattttttttttctttttactgttgaacttagaactatgctaatttttggagaaatgtcataaattactgttttgccaagaatatagttattattgctgtttggtttgtttataatgttatcggctctattctctaaactggcatctgctctagattcataaatacaaaaatgaatactgaattttgagtctatcctagtcttcacaactttgacgtaattaaatccaactttcacagtgaagtgcctttttcctagaagtggtttgtagacttcctttataatatttcagtggaatagatgtctcaaaaatccttatgcatgaaatgaatgtctgagatacgtctgtgacttatctaccattgaaggaaagctatatctatttgagagcagatgccattttgtacatgtatgaaattggttttccagaggcctgttttggggctttcccaggagaaagatgaaactgaaagcacatgaataatttcacttaataatttttacctaatctccacttttttcataggttactacctatacaatgtatgtaatttgtttcccctagcttactgataaacctaatattcaatgaacttccatttgtattcaaatttgtgtcataccagaaagctctacatttgcagatgttcaaatattgtaaaactttggtgcattgttatttaatagctgtgatcagtgattttcaaacctcaaatatagtatattaacaaattacattttcactgtatatcatggtatcttaatgatgtatataattgccttcaatccccttctcaccccaccctctacagcttcccccacagcaataggggcttgattatttcagttgagtaaagcatggtgctaatggaccagggtcacagtttcaaaacttgaacaatccagttagcatcacagagaaagaaattcttctgcatttgctcattgcaccagtaactccagctagtaattttgctaggtagctgcagttagccctgcaaggaaagaagaggtcagttagcacaaaccctttaccatgactggaaaactcagtatcacgtatttaaacatttttttttcttttagccatgtagaaactctaaattaagccaatattctcatttgagaatgaggatgtctcagctgagaaacgttttaaattctctttattcataatgttctttgaagggtttaaaacaagatgttgataaatctaagctgatgagtttgctcaaaacaggaagttgaaattgttgagacaggaatggaaaatataattaattgatacctatgaggatttggaggcttggcattttaatttgcagataataccctggtaattctcatgaaaaatagacttggataacttttgataaaagactaattccaaaatggccactttgttcctgtctttaatatctaaatacttactgaggtcctccatcttctatattatgaattttcatttattaagcaaatgtcatattaccttgaaattcagaagagaagaaacatatactgtgtccagagtataatgaacctgcagagttgtgcttcttactgctaattctgggagctttcacagtactgtcatcatttgtaaatggaaattctgcttttctgtttctgctccttctggagcagtgctactctgtaattttcctgaggcttatcacctcagtcatttcttttttaaatgtctgtgactggcagtgattctttttcttaaaaatctattaaatttgatgtcaaattagggagaaagatagttactcatcttgggctcttgtgccaatagcccttgtatgtatgtacttagagttttccaagtatgttctaagcacagaagtttctaaatggggccaaaattcagacttgagtatgttctttgaataccttaagaagttacaattagccgggcatggtggcccgtgcctgtagtcccagctacttgagaggctgaggcaggagaatcacttcaacccaggaggtggaggttacagtgagcagagatcgtgccactgcactccagcctgggtgacaagagagacttgtctccaaaaaaaaagttacacctaggtgtgaattttggcacaaaggagtgacaaacttatagttaaaagctgaataacttcagtgtggtataaaacgtggtttttaggctatgtttgtgattgctgaaaagaattctagtttacctcaaaatccttctctttccccaaattaagtgcctggccagctgtcataaattacatattccttttggtttttttaaaggttacatgttcaagagtgaaaataagatgttctgtctgaaggctaccatgccggatctgtaaatgaacctgttaaatgctgtatttgctccaacggcttactatagaatgttacttaatacaatatcatacttattacaatttttactataggagtgtaataggtaaaattaatctctattttagtgggcccatgtttagtctttcaccatcctttaaactgctgtgaatttttttgtcatgacttgaaagcaaggatagagaaacactttagagatatgtggggtttttttaccattccagagcttgtgagcataatcatatttgctttatatttatagtcatgaactcctaagttggcagctacaaccaagaaccaaaaaatggtgcgttctgcttcttgtaattcatctctgctaataaattataagaagcaaggaaaattagggaaaatattttatttggatggtttctataaacaagggactataattcttgtacattatttttcatctttgctgtttctttgagcagtctaatgtgccacacaattatctaaggtatttgttttctataagaattgttttaaaagtattcttgttaccagagtagttgtattatatttcaaaacgtaagatgatttttaaaagcctgagtactgacctaagatggaattgtatgaactctgctctggagggaggggaggatgtccgtggaagttgtaagacttttatttttttgtgccatcaaatataggtaaaaataattgtgcaattctgctgtttaaacaggaactattggcctccttggccctaaatggaagggccgatattttaagttgattattttattgtaaattaatccaacctagttctttttaatttggttgaatgttttttcttgttaaatgatgtttaaaaaataaaaactggaagttcttggcttagtcataattcttatattca

SEQ ID NO: 41 - DNA, 45684 bp, Homo sapiens
  misc_feature 1..45684: note = K-RAS
  source 1..45684: mol_type = other DNA
ctaggcggcggccgcggcggcggaggcagcagcggcggcggcagtggcggcggcgaaggtggcggcggctcggccagtactcccggcccccgccatttcggactgggagcgagcgcggcgcaggcactgaaggcggcggcggggccagaggctcagcggctcccaggtgcgggagagaggtacggagcggaccacccctcctgggcccctgcccgggtcccgaccctctttgccggcgccgggcggggccggcggcgagtgaatgaattaggggtccccggaggggcgggtggggggcgcgggcgcggggtcggggcgggctgggtgagaggggtctgcaggggggaggcgcgcggacgcggcggcgcggggagtgaggaatgggcggtgcggggctgaggagggtgaggctggaggcggtcgccgctggtgctgcttcctggacggggaaccccttccttcctcctccccgagagccgcggctggaggcttctggggagaaactcgggccgggccggctgcccctcggagcggtggggtgcggtggaggttactcccgcggcgccccggcctcccctccccctctccccgctcccgcacctcttgcctccctttccagcactcggctgcctcggtccagccttccctgctgcatttggcatctctaggacgaaggtataaacttctccctcgagcgcaggctggacggatagtggtccttttccgtgtgtaggggatgtgtgagtaagaggggaggtcacgttttggaagagcataggaaagtgcttagagaccactgtttgaggttattgtgtttggaaaaaaatgcatctgcctccgagttcctgaatgctcccctcccccatgtatgggctgtgacattgctgtggccacaaaggaggaggtggaggtagagatggtggaagaacaggtggccaacaccctacacgtagagcctgtgacctacagtgaaaaggaaaaagttaatcccagatggtctgttttgcttggtcaagttaaacccgaagaaaacccgcagagcagaagcaaggctttttccttgctagttgagtgtagacagcaatagcaaaaatagtacttgaagtttaatttacctgttcttgtcctttcccctatttcttatgtattaccctcatcccctcgtctcttttatactaccctcattttgcagatgtgttctacatctcaagagttattacagtactccaaaacagcacttacatgattttttaaacttacagaggaattgtagcaatccaccagctaaccgcctgaaatagacttaaacatgtgcatctcctttttttttttttttttgagacacagtctcgctctgttgcccaggctggagtgcaatggcgcggtatcggctcactgaaacctccgcctcctgggttcaagcaattctcctgcctcagcctcccgagtagctgggactagtaggtgcacgccaccatgcccagctaatttttgtatttttagtagagacagagtttcatcatgttggtcaggatggtctccatctgctctgttgcccaggctggagtgcagtggcgccgtctcggctcactgcaacctctgcctcctgcattcaagcaattctcctgcctcagcctcccgaataactgggattacaggtgtctgctgccatgcccggctaattttttgtatttttagtagagacgggggtttcaccatgttggtcaggctggtctagaactcctgacctcgtgatctgcccgcctcggcctcccacagtggcatgtgcatcttatagctgaagtctaagccttcttaaatcttgagatccatcaaaacagacaggttttctaattgttatacaatgtatatgttatgtttataatagaaatcattttacaaataagttataaatgggaaaggtctatttgtaattatcagctcagaattaaccataaaactggtgtcactgaagtgactgaggtccaaaatgctgactctgcatgttatagactacagatatcaaatatggttgctaacaatagtttactttgagactgtagccatccacagtatatttgcttttaagagatggtagatggtaattcagttttatgaaaaataaaaatgaattttcttccattacaaaattgttggattcgagtccagtccactccttactagcttttctaactctcggtgagggatcccctcccagcccatgatcttcatttggtaagactcctttggaacccagttctctctagtggatttaaatgtgatttggttttaaaaatctcattcaaggaattttttttttttctggaaacaaccaccgcataaacaagtaaaccggaagatacatgtggctctgaattcatatatatacacaaactctaatccaatgtctgtccacagtatttcctaggctagtaaactttttggccttaacgacccctctaccctctttgtttttttgagagagagagtctcactctgtcacccaggccggaatgcagtggcgcgatctcggcccgctactacctccgactctcaggctcaagcgattctcccgcctcagcttcccgagtagccgggattacaggctcccgccaccgggctaattgtatttttagatacgggatttcaccatgttggccaggctggtctcgacctcctgacctcaggtgatccgcccgcctaagcctcccaaagtgctgggattacaggccaccacacccggcctacactcttaaaaattatcgaaggggccgggcacattggctcttatctgtaatcccagcactttgggagactgaggcgggaggatcgcttgaggccaggagttggagaccagcgtactcaacatagtgagaccttgttataaagaaaaaaaaaatccaggattaaaaaaaatctttgatttgtttgggatttattaatatttaccgtattggaaattaaaacaattttttaaaatgtattcatttaaaaataataagcccattacttggtaacatgaataaaatattttatgaaaaataactattttccaaaacaaaaccaaaacttagaaaagtggtattgtttcacacttcagtaaatctctttaatgatgtggcttaatagaagatatggattcttatatctgcatctgcattcaatctattatgatcacacatctggaaaacttgtgaaagaatgggagttaaaagggtaaaggacatcttaatgttattatgaaaacagttttgacctcttgcacaccagaaaagtcttagtaacctgaggggttcctagaccacattttgagaactgttttaggctatgcaaactggttggggggaggttggggtaggcagagagctagaagatacattttagtgtaattctcctcatctattcctaattgctttggcctacatttgaaataaagcgtggaggcaaacgggataagatacatgtttgtagtggttgttaacttcaccctagacaagcagccaataagtctaggtagagcagagtaaggcggggaactatgccgtgaccgtgtgtgatacaatttttctagcctgtggtgctttttgcggcagggcttaggagtaaggttagtatgttatcatttgggaaaccaaattattattttgggtcttcagtcaattatgatgctgtgtatatttagtgtttatctacaatatatgcacattcattaatttggagctactcatcctataataaatagttgtgcatttactcccatttttttctgcatttctctccttatttataattatgtgttacatgagggaaaggaggtgaaattaaacattcatattatttcaaaaaatttgaaacaactaactaaaaaatatgttttattttctgtatggtgtttgttatacaatctgtcaatattcatgcacctcttgggagacagtgtatgaaaagcaaagagtaacagtcacatggattactgattactgagatatattcacttgcatctttttttttttttgagacggagtggctctgtcgcccaggctggagtgcagtggcgtgatctcggctcactgcaagctccgcctcctgggttcacgccattcttctgcctcagcctcccaagtagctgggactacaggcgcccgccaccacgcccggctaatttttttatatttttagtagagacggggtttcaccgggttagccaggatggtcttgatctcctgacctcgtgatccaccctcctcggcctcccaaagtgctaggattataggcgtgagccaccgtgcccggctcacttgcatctcttaacagctgttttcttactaaaaacagtgtttatctctaatctttttgtttgtttgtttgttttgagatggagtcttactccgtcacccaatctggagtgcagtggcgtgatctgggctcactgcaacctctgcctcccgggttcaagtgattctccttcctcagcctccccagtagctaggactacaggagagcgccaccacgcctgattaatttttgtatttttagtagagagagggtttcaccatattggccaggctggtcttgaactcctggcctcaggtgatccacccgccttggcctctgaaagtgctgggattacaggcatgagccgccgcacccggctttctaatctttatctttttttgtgcagcggtgatacaggattatgtattgtactgaacagttaattcggagttctcttggtttttagctttattttccccagagatttttttttttttttttttttttgagacggagtcttgctctatcgccaggctggagtgcagtggcgccatctcggctcattgcaacctcggactcctattttccccagagatatttcacacattaaaatgtcgtcaaatattgttcttctttgcctcagtgtttaaatttttatttccccatgacacaatccagctttatttgacactcattctctcaactctcatctgattcttactgttaatatttatccaagagaactactgccatgatgctttaaaagtttttctgtagctgttgcatattgacttctaacacttagaggtgggggtccactaggaaaactgtaacaataagagtggagatagctgtcagcaacttttgtgagggtgtgctacagggtgtagagcactgtgaagtctctacatgagtgaagtcatgatatgatcctttgagagcctttagccgccgcagaacagcagtctggctatttagatagaacaacttgattttaagataaaagaactgtctatgtagcatttatgcatttttcttaagcgtcgatggaggagtttgtaaatgaagtacagttcattacgatacacgtctgcagtcaactggaattttcatgattgaattttgtaaggtattttgaaataatttttcatataaaggtgagtttgtattaaaaggtactggtggagtatttgatagtgtattaaccttatgtgtgacatgttctaatatagtcacattttcattatttttattataaggcctgctgaaaatgactgaatataaacttgtggtagttggagctggtggcgtaggcaagagtgccttgacgatacagctaattcagaatcattttgtggacgaatatgatccaacaatagaggtaaatcttgttttaatatgcatattactggtgcaggaccattctttgatacagataaaggtttctctgaccattttcatgagtacttattacaagataattatgctgaaagttaagttatctgaaatgtaccttgggtttcaagttatatgtaaccattaatatgggaactttactttccttgggagtatgtcagggtccatgatgttcactctctgtgcattttgattggaagtgtatttcagagtttcgtgagagggtagaaatttgtatcctatctggacctaaaagacaatctttttattgtaacttttatttttatgggtttcttggtattgtgacatcatatgtaaaggttagatttaattgtactagtgaaatataattgtttgatggttgatttttttaaacttcatcagcagtattttcctatcttcttctcaacattagagaacctacaactaccggataaattttacaaaatgaattatttgcctaaggtgtggtttatataaaggtactattaccaactttacctttgctttgttgtcatttttaaatttactcaaggaaatactaggatttaaaaaaaaattccttgagtaaatttaaattgttatcatgtttttgaggattattttcagatttttttagtttaatgaaaatttaccaaagtaaagaccagcagcagaatgataagtaaagacctgtaagacaccttgaaggtcatggagtagaacttccatcccaagcagatgaggatttatttaatctcaaagacctccaggaggggacattccccaactgtccttgttaactcattttcagaacatatttattagcatattttacatgtaatttggatcttcatgttaaatttaacatcagtggagatggaaaataagcatatcgccttgtctttgaaatagccctatattgttagattgtttcttaggcttctttaccctgggttaagcagtcctaatactttagcatttattctacatctagtgtactaatttaaaaaaatcagttctgaaaaatttctaagaactttcttcaagttccaagctgtgaaatctagaacaggtcaaagtgccttattaacgtactgtactgtgtagtgtcttgaagagacactttgcgctgaggcaagttctgagggcattgggtggccttgggaagatatttatgcagtttagaacctggagaattgattagataactaatcataaggaaacgtcacatatttttggtactataaaaaagtggagaaataatgcctatttgcaaagatttgatttaaacatagaaacaactttatttggcttccaattttaagaatttacagcagtaaaggggaacagtctaattgaagtagactgcctatgcaatagtctctgtatatttacttttgacaagttaattcaatgtgtactatagttttgtttctttgaagaggtttgaatagtgcacccattttaatctgtattgcaaattcagggttacttggcagactctactatttaaatcagatgtaaaaggaagttttaatataattcactttatgcctgaaagttttcctgggattttggaaggtgattttactggaaatgctgtctgtcttccctgaaaatctgagaaattccattacactttgtttccaatcagaggtcatgagtgctatatgagtatatacagcatgacgtcatgaatgtgataaagtgggttaggaaaccttttgctaatgattgttaaaatgcaatataaatgttgaagaaataaagctaacagttaagcctttatttgggcggaaggctgaaaaagtttataaacttaaacctataactctgcttatgatttctgccaaaccagaagacttgactctgggaagcattggttacctgtgaactttgaaactgacggtccctgacgtagtttagtcacctgggaaaaggtatctgagattatctcttatctcccaagttacagtgagtctctgagggaactgacacattacattaagttcttggtgtagttaaactgtaagaaaggcaggagaacttagtagttaaatagttggttaaatggaaatgctgactccatgttattgtaaaaagttaaaaatttaggaggatatggggatttcactgccattgcaggttttgattggtatttaccaatccgtgtgggtcagagagaaaattagaaaggatatgactgcacattttggaattattagcagtttttctacatttaaaatggaaataaattttttaaaaatttaaatcaagtaatactgtattttttggtgatttagatttttcaaaatttacactaagagatagtaaggagggtggctattgtttctttcaataatgtctctgagaggttgtaactcatctaaggatacgtagctaataagtggtaggatttcaatttaaattctctgagaccaagttaagtagaatttgcactgtactcttgtataactttttaaaactgaaaattagctatctttcaaattaagaaaatatttactaatggagactaattcagatttgtaagtataccaaaatttgaacttagcctgctatctaatggcaacttagtggcagaggtatgatgtaaaatcattcaggtatgacacatagatggagtatgtttgtattcgaggctgtgcacataatcacctttacttgtattgtgaagtatatattgttatcttttatgaagcccactaaagagataatgaaatacctcgttattagggcaagattattgaaaactcaaaatagcccccaaacacaatacttggctagaaatatatacctttatagttcagagatcatttattatcaaaaccctgaagttttttttctaaggtaaaatttggtggaagaggaaaagtctcgttttaaaaaaatgtaggtagttacagagatcagaatgattagttgatcacttaccaaatatatattaagtatctactgtatataatatgctagtaagaataaatatagcaggaagtattttttcccaggctctaattgtttgacatcagcatgcttttattgtggcacttataattcagttcaagtattatgcccctctttgatggaacagtttcctattcagtaaggaagaccagattaatcattggattggtttgtttcatctttagtgttctgagctgtagagtatttatttaccaaggtttattttaatttttattttatttttatttttccatgttcattgtagaattcattttacctacgaatgaagtatgtagattatagagagaaaatttgtaaaattaaactgatactgaagactggtataagaaaagccttatgtaatttgtaagctgctattcttctgagtttatacatatatctttagtaatcaatgagggatggttgggtgactgccctccaggggacatttggcaacatctggagatgtttttggttgccacaacttggggagagagtactgctactggcatctattgagtagatgctattactttaaatggcaaagctgcagttacctttgcaccaacctaatattaaacttcctgcagtgcacgggaaagcccccacaacagggttatctgaccccaaacctcaatggtgttaagatccaaaccttgatatgttaacctgtagctttaaacatcctttaaattgtcaaattcatgtccctgacataaggtttatgttagattttcaagtataacaaagatttaaactttaacttttgtacgttaatgatatgttagcttactccagtcttctattaaaacattctgtttttaaaatcagagacacacagcaattttataaatcatttctcttcaaggctgtgaagctctccccacttttgtgagtgccctctactggtcaaattatttgctttataacaagtaacagtgaaatcctaagtttgtgtagtttcgctgtttaaattatgggtggcatcaatttataaatatattcgttttatttaaaagtcttatatgattgatttcgtatcatttttgctctctgctaatattaatataaagattactgtctgtattagttaggcctaactaagtaggtgagtatagtgaactaagaaaggaaacgaggcagtatataagaaaatagggtggttcagttgttaacacttactgagcttactttgttgaagggactaaaaggcagcagtgtggctctctgagcttctttgcatgcactcaggagctgcttaatggagtccaaggcttggtggtgtgttacaggggatgataggagggtcctattcagaagtggcaaattgtgaaagtgcacattttgtagagttttataggactgtagaatagttgtgagcacctgatttttagaataaacagaaaactcaggtactgtatttaggtcaaattaagaataagtatttattaagacctgaatataaaactttactggtcatggtttttttctaccttgggtttttataaatccaaagatttaaaaacatacaaatggaagttggtaatggaattaagtgaaaggaaaaaatgattttatggtttggaatctcctaagattctggttttaacaatacaactaattccttaatcctagaaatgttcttcactgcccactttgtaccatgcagtcttcctgtgggctagagatacactgaggcgcaaaacagaccagattcctgccttcatggagcttattagttttaggtatctctagatttcttgtaatacctattacaatgcctgcacatcagttcattcatgtgggttcaacgtagtactcagtacatggcaaattcaagttttacttttcggaacttcatggatttttttcctcagaatatcttttatccataattggttgaatctgtagatgcagtacccatggatatggatggcccactttattttgaagagcagtgtttctaggcaatcatgctaattatatatgacttaatttagaggctttatacttaagagcattacatttctggcgtctcttaaccattattatttcataatgtgtaggttatggaacagttaaattattgggatcttaatatagaaattagtagaaataagccagatatggtggctcatgcctgtaatcttagcactttgggaggctgaggctattcgctgtactattttttactacttttctataggtttgaaattttttcaaaataaaacattgaaaaaagtaaggtaggtagtgtgtccctccttaatcctttcaaatattttattttcactatttctattaatttttttttttgtttttgagatggagtctcgctctgttgcccaggctggagtgcagtggcgcgatcttggctcactgcagcctccacctcctgggttccagccattctcctgcctcagcctcctgggtagctggtattacaggcatgcaccaccacacccaattactttttgtatttttagtagagacggggtttcaccatgttggccaggctagtctcgaactcctgacctcgtgatctgcccgcctcagcagtgtcactgcttctagaccgttttcaaggcacagagcttagaaatgcatgttactaagaaatcaagagttaactatttttcaccttctttctcccgcagtgagaaccctggttctaccctgtttctccttgtgtaaattttaatgctaaactatacacttgtgaaataaaaatgataatgtcattcttaaattatggatcttgcagtgttatctaagtaacatagattgagtgatttaactttaggtttccttatttgtggaatttggataaatatttttcacccttgagaaaagtgagactcctttctcatcatcagagtatccttaaaccattaaggcaaacatttgggaaaaaactgagctatctggctgcataaaaattaagttttctttaacaaagatagaagacaaatgaaaacctagaaaaaccatttggttcaagtaacaggaagctatcttatatatgaattagagaaaagcaaacacacaaatagaaaaaaagggatggggggtactaaagatataaatagcttgtctaccaaaaaagaaataaaataaataacatgaacatataaaaagacacttacttcatgaatgtgatgcaagttcaaacaataaataacatttctgtactttcatattggctaaggttaaaatgataactgctaggaagggtatggagaagtgtgcgccttgcactgtagtgggagtatagaccctcagactttatggaggtcagtctggaaatatgtttcaaaatgtaaactacatgtcctttgaccaggtaattcaacttcttgaaatttatccaaggatttaattggataaatgtttaagatgtatatataagaatgtttactgcagtgttgtttatgattttaaaaaaatggaaatcatcttcatgtctaccaatagagaatgggtgaataaattatggtatgtccatatatacaaattacatagttgttggaaatattaggtagatttagatatactgatgttcaaaaatgtccattatgtaagtgaagctgggtcacagcaccttgtgttgagtatgatttcatctagaaacaaaattactccctcatcctttgttgtgttttagttttttaaaataagcttataccattgggctgggggaaaagtaaatactcgttttggagagagaaaagggcactaaagtttcagataccgttagattatttcatgcttatttttcaagcctcaataaattacataattcacatgtagtcttggattaaggaaattgctattaaggctaaataaataatatgagaggtatataatataaaatatgaacattatattggcattaagattggatccacggtcattccagcctctcattcttacctggacttcaagtgatcacttgtgggcaaatgccatctgacttgaacaggttacacatgtatgctcattatatcgttattttcaaaatttgtcatataaattttccttgagttcattcagatttttgaactagttttttctcttgggagtagtacacacttaattctctctagtactaagctaatgttcaccattcttataattttaagtatccagcatttagtaaagaagtctttgttttctttatccttacttttagtgaatgtcttagtttttaattgaaaattctgccatgaaaataagctctttaacatcttcactccctaatcaaaacagaaatccttcatagccttcagttgtagctatccttccctgtgatttgtccagctccattatatttattttgaaatatggtgaccagttttgcaaaattatttcaactgtaggtgcccagtgattttgtaaggagaagatactgtttctgaacagttctcagtagccagtggcctgcccctactttttggcctgcgtgtagtatataaaataatgcagttaactttttatagcacttttcattttataaagagattttcatggtctttaatattaatctatgtataaagtcctgtatgcagttttacctactttcacagctgaaggaacaatagcttagagaagatgtgagataaagtagtttgcccaagcccatagcacaaataagtgaagttcttcggctgtccatggatcgaagactcccaagtctatctctagcctggacttctgtcctgagcaccagacatgtatgtatatcaagatgcctgcaggtcatatccaccaggacaacccatgagtacagggaattcaacatgcccaatatcactcatcttttccttcgccctcccctttgtactcatcccctgtcggtaagctctgttattttaaaaaattgaaatgtattcacatagcatacaatttacacttttcaagtgtacatggtttttagtatattcacaagggttgtgcagtcattactactaattccagaatgttattatcaccccaaaagtcccacatccattagcagccactccccaatcccttctcccaccagcctctaaaaactgctaatttttccatctctgtggatttgtccactctgattatttcatataaagagaatcgtacagacgtggccttttgtgtctggcatcctccacacaggatgatattttcagagttcgtctatgtttttgcttgttgatcattccttcattcctttttctggctgaataatactctgttatatggatataccttattttgtttatctgttcatttgatgggcatttgagtgatttcctctttttggcaattttgaataatgccactataaacatttatgtacacgtttttgtgtgaccatatgttttcacttctctcgggtgtatatctaaggtacagttgctgggttatatggtagctctgtctttgactttttgaggaactgccaagtggttttggtagtgattgtactgtttacattcctaccaacaattttacctaagtatttctcaaatctatttaatcttttcggtccatactgctgttgctgccttagttcagattttgtcatttcttgtaataattcgtagctcatctcccagtctctgctcccctctctccctccctcccccttcttctctctcttatttccacccatttttaacatttatagaagtcaaaagtctagttcagaaagcagaaaccatactagatatttcagcacagagaactaattaggtgttggaagactgaaaggcaaaaaaacactgaagtaacacagtaacatcaagaatgggcactactcctaagattcagggaatgctgggaagatttggggtttatcagaactggaagctcagaggaggggccccttgtcgctgaggcttaatccctgcagaggtgcctttggctgctactggtgaatctgagtgggtatgatgagtcagtgtctgggaagggccaaaacattttgtccctttctataatttgtcatgataatgctagtaatgaatctgatctcccttcctattttaaaaaccttttagtgattttgtataggatgaagtttaaaactccttacttaatatacacatgaccctccgtaagctggcccctgcttgattgtccagtttcacttcttggtgcttattctaaggcctctaagccttagagatcctctaagcctttgagatccccaaaccctggactgcggactggtacccacctgtgtggcctgtgaggaactgggctgcacagccggaaggaggtgagcattacttgccttagctcctgtcagatcggcagcattagattctaataggagcgtgaaccgtgttgtgaactgcccatgcaaggatctaggttgcatactccttaggagaatctaactaatgcttgatggtctgaggtgaaacagtttcatcctgaaatcacccccaactcggtccttggaaaaattgtcttccacgaaactggtccctgatgccggaaaagttggggaccgctgttctaagctaaagttatatggagctccttggttctgtgtcctcaacatgctgttctatgttttttacattctgtttgctccttcctgcttggaatgtccttcccctccccgtctttcttaatgcatacaaagttgatctctcctgtgtgccaccattgtacttcgtcttgcatatggtgttacattcattttattttaattatttatttacgttcatgtctcttccactcaccttagttgcttgaggtcagaaactatataatgtgtgacacggaatgtgacacctagattttcaataagtgtttctatgatacaagggagactgatgtgggtagatgggaatgaactcatcaacctctgtttacataccctaaattccctgtttcttccctattataattctgacagtctacaaccgtctttgatggcttataaacggaaagtgcggaacacatcattctacagtgaatttaaataacctttcggaagagtaacgtaaagtacttgagcattaattgagtaaaagtttctcatcttttcctacaggtgttattaagcagtatgtaaaaagtccttacaatacttaatacattaagaaaacatacaatttcaagaggaaatccccgagtaatacattattgacattttcagcagttctagttatattgagaagagcatctcatggaattggcagaatgaagatggagattaaatgagatgatgtttgtaatatgcttatgacagtatctggcatataagtaagggctcagtaaatgttgactgctgtaattactattaatagtaatatgattacctttagtaaaagttattagtttctttaggttttttgtttactacaatatagtaaacaaaatctatacttggaatgtatatattgttttgttttgatacatggaatatgtctctgtgtcagagtcactgcctgagttggaaaacccatactcgagtatgttaaaaggtgaacacactgaataatttagttattaattataatggaaaaatgacaaacttgatgttctggttaatgaggttatcttatcttgaatgagttagcttttaaattcctcaaaataaaggcatttaataaaccaggaaacacttcattaaaaaaattatgcaagtcagtgtaaaagaagattaaaattccacatgggcaaaggacacacgttggcgataaatatgcagataagaaaaaaaacctatataacattattactcctcaaagaaattggtatgaaaacaataaaaatgtgtagcttatcaaaccaacaaaaatttaaaaatatgaaatccattttaagtaatgataaaatgggtgcactcttagtgctttatagaatagtagtataatgaacctcatgtgtgtaccaaccagctctttcatatcttaacatttagcaacatttgatttagctctttcttttttccaagatagaaaagttaatattgttgaagactcctgcattcttttccctagtcttattttcttccctcccataaatgtgttaaaatctctgtgtgtattgttttggttgtatttttacataaaactttacatattatataaaatttaattgaaggtaaaatttattaaattattcttaatatatattgtaatttaaaaattaacagcttcattgtcttgataaaatttatggtatcttaaacatgtgcttgtttttctaagagaacattgaaacatagattttaaaacaaattgttgaaagattaaaaaatctgcctttgcacactgttacattgaaagtggggcatttgtcgtgaacattcatttcaaatatgtagtatcttcagaatatttgagaaggatttgtattatataattgaaaaatctgttaaattgtatttatgttaactgcttaattctaataaaatttccattcattttttagtatctgcatatatttacatcaaatggattcattcacttatttaagaggcagtactaattacctatagcgttcaagactgttaggtagagggtgtgtagtggtgagtacaacaggcgtgagccctaccaacacggagtttaaagcctagtagaggatatagacttaaacaatttcacaagtaaatacataattacaaattataatacatgctatgaaggaaacataggaggtaccagagaaggaagagtgctttgcatttttatttttaagaccgaagagtgctattggaggactttgagcaagtgaatgacatgatctaacctaccttcgttcattcattcattcattcattttcttccttcctggctcaagcagtcctcccacctgagctccccaaatagctgggactacaggtacacactaccacacctaatttttttttgtattttttgtatttttgatgggattttaccatgttggccaggctggtcttgaactcttgacctcaggtgatccacctgtctcggcctcccaaggtgttgggattataggtgcctagcccatggtgcctagccctaacctacatttataaactatcacttgctgctgtgtggagactatattgtgagattaacagcagggatacctgctaggaagcaattgctgcagattgcctgagacaaaatagttatcatggactagggggatggtggtggtggtggtggtaggtggttggatgtaggatatattttgaagataggtaaatggtgcaagattatgggtcagttttaaatgcttaagtaaattttctttgtaagacattttaggatgccatgttaagaatctctttataactgtcatttaaaaaaaaaccacatattttcttagcataatttcccatagtaacattactatgtcaaaggctatgaacatttgaatgactttagataaatactgtaattgctttccaaaaatattgtgcttattatgtcaccagaaatgtttgaattctgtctacaattcagtcttgccagtatagtacatttcatttagaaaaattttttactatgtagatggaaaaaataatattttagctgggagtggggggactatggggaataactttccttcatttaatattttattgtgagttagtttaagttactttattttatcgtagtttcctaaggctacaaattagtaaccttggtaacttatgtacctaatttaaaagtttacttttttgaaaggctggaaatactaattaaaaacgtaacaccttcatccttgtctttgctccattattaactagtttcattacagaatctctgtgttttaaaatcagatgggttttcataaccagtactttctcagagtggtaaatttaaaaaaatatataaagagaataaataatatttgttgagaatacttcaaataatgtgaagagttattaacttacagcaggagttggcaaacttttctataaagggccatatgggtctttgtcacaaagtcttgggtttttgtttttgtttttttaaacagctatttaactattcctagctaatgggcaatacaaaaacagtgggcaagatttggcctgtgggcagtagcttgctgaaaccttatttagactctaaattttttgaaagagtctacattgatgcatatttttttttcttcctccaaatacagttgacccttgaacaacatgcgtttgagtgaccatgggtccacttgtgatacacgtttttttcccaaccaaatgcagatatggagggctgacttttcatatacctggatgttcctgggccaactgtaggactagaggctgggggggtcttggaaccaatgccgtgtgtataccagggatgactgtttcttatggcctgacctgaagttggaacagaatctttattaatatataatttttgttgcgtttgttttctctttatatttatccattctttttagatcgtatttcatttaacactttttcttctttagtttttaccaagttgcactgaaaatagctcagtgactaattgcacttctaagagtgaggaccctagttaaaattaactctaaaaatactgaatttttaacctaaaccttttatttctaatcaacagtattatttatgagtaggttatagattactttgaaacggaatgtgtctcagaactttgctatcgatatttttaaggtctggtagggaaaagataataggaatgagatttatcagtgaataggggactgctttcccagtttctcggtcgcactggtgtattcaccatggaagcatcttatgaaatatgtacataaactactaatatcccacattacaggttgactattctttatctgaaatgcttaggacctagaagtatttttggattttggtttttcagagtagggatactcagcctacattggtaagtaaagaatgtgaggtgacaggctgggcgcgatggttgacgcctgtaatcccagcactttgggaggccgaggcggatcacctgaggtcaggagttgaagaccagcctggccaatctgtactaaaaatacaaaaattagctggacacagtggcacgtgccagtagtcccagctactcaggaggctgaggtaggagaatcgcttgaacctgggaggcggaggttgcagtgactcgagatcgtgtcactgccctccagcctaggcaacagagcaagactccatctcaaaaaaaaaaaaaaaaaaaaaaaaaaagaatgtgaggtggcagcaataggtaggaagagtctttggtcagctttacatgctctgtagccatgcctgggtaatgggttgactctaagactctgtgctttgctcccacctcctgctttttcattactctttagaatggtttttaatttgtgatctataggagttctttcaagtatttaataagagaataggctaaattaagtaaatgtcaactgaatgctcaaatctctactaaagagcctcttatttagaaaataaatatccatcttttttttctgactggtgagataattaatttttattacagatggtttggaaaataccatatgctttaaaagataagcacaaaattatagtctaatatgtaggttttcatactttaaaaaattgaaaaccaaagaaaaacatttaacatagcatctagtacaaagaaaagagataagcaagagataaatgtcttttttgggacagagttttgctgttgttgcccaggctggagtgcaatggcacaatctcagctcaccgtaacctccacctcccgggttcaagtgattctcctgcctcagcctcccgagtagctgggattacagtcatgcaccaccaggcccaggtaattttgtatgtttagtagagatggggtttctccgtgttggtcaggctgatctcaaactcccgacctcaggtgatctgcccaccttggcctcccaaagtgctgggattacagacatgagccatcgcacccggccaagataaatgtcttttaaattatctccattaaagacataacctttataacattttgatgtatatattaccagtttttaaacacatagtagatttgtataaatacataaacacatattattgtgatcatgctgcacttagacatctttatattctccttatactgtaaacattttgaaatactttactaacaacatttgtaatgaccattctttctctctttctccctctgatagaatggtctacagagtaattcataaactaaacatactttagaggctgggcgcagtggctcatgcctgtaatcccagcactttgagaggctgaggcgtgcagatcacgaggtcaggagttagagaccagcctgactaacatggtgaaaccccatctctactaaaaaaacagtacaaaaattagccgggcgtggtggcgtgcacctagaatcccagctactcaagaggctgaggcaggagaatcactcgagcccaggaggcagaggttgtagtgagccgagattgcaccacagcactccagcctgggcgacagagcgagactccatctcaaaaaaaaaaaaaaaagatacattaatactatagcctacatgtggaacattaagaaaataattgcttttatgtttatgctttatacctgttgttagccctgcttcttatttcatgatttcatggcttcacattgtaacatccctttaccatattttttgaggactgttttggcagaatgtgtgaaatcttgagcagaagtattacccaaaagtcagaagaaaatcagatttttatttcaagattctgttaaagttacccactcccttcttttacttaatcttatagttgcagttctctctctttttagaaaagaaaaaagaggcccctcaggatttgcagatgaaacaatattgctctttagagatatccatctggctgttagattatttttccacagttttcagaagtggatgaggccattagaatcttgagtattgcccatttccttatgtgtgcctttgactatagataaaatagatgcatgacaattatttataagttgattgatttttcttgtcatttaaatcatcttgaataatagagttggtagagctatcccatttttgaaattattttgttttgtcaataactttttgttaccagcatgtacacttgcattgttgactctccatataatacctttaaaaaatttttttttgtggtaaaatatgcataacataaagtttaccatggtagttttctttcatttgttttgtttttgtttttttgagacggagccttgctctgttgccaggctggagtgcagtggagcgatcttggctcactgcaacctccgcctcccgggttcaagcaattcccctgcctcagcctcctgagtagctgggactacaggcgcccgccaccacgcccggctaatattttgtattttaatagagatggggtttcaccatgttggccaggatgttcttgatctcctgacctcatgatccgcccacctcggcctcccaaagtgttgggattgcaagtgtgagccaccgcgcctagaccatggtagttaattttaagtgttcaattcagtgaccttaagtgtgttcataatgttgtgcaaccatcaccatgttgtctaaccattagcactatctgttttgagaacttttttttatcatcccaaattagaattctgtacctgtcaaatagtccccagtaatcctccctcccccagcccctggtaatctgtagtctacttttcgtctttttgaatttgcctattttaggttcctcatataagtggaattatgtggtatttgtccttttgtgttggcttacttcatttagcataatgttttcaaggttcatctgtgttgtagcatgtatatacaggttgaagcatccgttatccaaaatggttgtgaccagaagtggtttggatttcagattttttttttggattttggaatattcatagatacttaactggttcagcatccctcgtccaaaaatccaaaatcagatggagctcagtggctcatgcttgtaatcccaacacgttgggtggccaaggcaggaggatcgcttgagcccaggagttcaaccagcctgagcaacacaagaccctatctctccaaaaaaaaaaaaaaaaaaaaaaagatgaaagaaaaaaaaatccaaaatcaaatgctccagtgagcatttccttttagcatcatgtcaggctctaaaagttacaggttttggagcattttggatttcagatttttggattaacctgcattaatgctcaacctatatgaaattttattcctttttatggctgaataatgttccactgtatgtatatactacattttgtttatccattcatctgttaacagacacttaagttatttccacattttgggtattataaatagtgctgctgcgaacattggtgtacatgtatctgtttgagtccctgtttttagttattttggttatatacctaggaatggaattgctgatcatatggtaattctgtgtttaactttttgaggaactaccactgttttccacaatggcatcaccattttacattcccaccagcaatgcacaaagatttcagtgtctgtatccttgctaacacttattttccattttttgagtttttttgttttgtttttttaataatagccaatcctaatgggtatgtggtagcatctcatggttttgattttattttcctgactattgatgatgttgagcatcttttcaggtgcttagtggccatttgtccgtcatctttggagcaggaacaatgtcttttcaagtcctttgcccatttttaaattgaattttttgttgttgagttgtatataacaccttttttgaagtaaaaggtgcactgtaataatccagactgtgtttctcccttctcaggattcctacaggaagcaagtagtaattgatggagaaacctgtctcttggatattctcgacacagcaggtcaagaggagtacagtgcaatgagggaccagtacatgaggactggggagggctttctttgtgtatttgccataaataatactaaatcatttgaagatattcaccattataggtgggtttaaattgaatataataagctgacattaaggagtaattatagtttttattttttgagtctttgctaatgccatgcatataatatttaataaaaatttttaaataatgtttatgaggtaggtaatatccctgttttataaatgaagttcttgggggattagagcagtggagtaacttgctccagactgcatcggtagtggtggtgctgggattgaaacctaggcctgtttgactccacagccttctgtactcttgactattctacaaaagcaagactttaaactttttagatacatcattaaaaaagaaaaccataaaaaagaatatgaaaagatgatttgagatggtgtcactttaacagtcttaaaagcaatcgtgtgtatagcatagaattgcttggattggataaacagtggcattatatattttaaaaaataaaagttttgaaagattgaagaatttgggcattacagttctcttaaatctgacaaagctgcataaaactattaaaataatcattattatactattttatattctatttctttgagggtttagttttccaaaaactacatattaagcaaatgaatcactcagtggctatgtcatataataacgagttagcctagttataagaagtttaacattttatttaagaacattgttacagcatgtttactgtatagtctagtaatagaggaaaagacatttgggtgggtggtagtggtagtatttttatagaggagttaccaaatttcagctctattatccaagtttacccagctaatggtgttcggaaccgggaatttgagccaattctgactctgttgtctgctctgctccttcttttgtgctgtgtctttgaaagtcacctaaaattgtgagggaatgtaatttcaccccaaatttagagtttatgcacttgttatattgaaaatgattaacatgtagaagggcttttaatggaataagtggtgtagtaacttcagtgttgcctacctagaaatcaaaatctttctagttgtccactttgttttttgaaaaagtaatatgaaaattatgttaatgctttaattcaggtttttgtaaaatattttttatctttacacatttaacatacgtttctaaaattatagtctgttatatagcactttgggtctagaatttttcagtagtttctgttttactattatgatctacctgcatattaacctattaggttatagttttactatacttctaggtatttgatcttttgagagagatacaaggtttctgtttaaaaaggtaaagaaacaaaataactagtagaagaaggaaggaaaatttggtgtagtggaaactaggaattacattgttttctttcagccaaattttatgacaaaagttgtggacaggttttgaaagatatttgtgttactaatgactgtgctataacttttttttctttcccagagaacaaattaaaagagttaaggactctgaagatgtacctatggtcctagtaggaaataaatgtgatttgccttctagaacagtagacacaaaacaggctcaggacttagcaagaagttatggaattccttttattgaaacatcagcaaagacaagacaggtaagtaacactgaaataaatacagatctgttttctgcaaaatcataactgttatgtcatttaatatatcagtttttctctcaattatgctatactaggaaataaaacaatatttagtaaatgtttttgtctcttgagagggcattgcttcttaatccagtgtccatggtactgcttttggctttggtttctttctacattgaaaatttctcttcaattctgagcacatgttaacatttagaattcaagaggtggggatttttttttcccatggttacatatatatatatatatatatatatatatatatatatatatatatatataaagaacagggcaacaaatttttgcgttttctatttcggtagtacttttaaaccattatgtcatgtttctaggttaaacgttgttgtatttgaagaattttactttggcagaatttttttgaggatgtgtttatttctggagaaaggtctcattaaagaaagacaatacccagaaagccaacagaaattctgttactcatttaatgcatttttctgacaaaaattattgccagagagaacctgaattttgtttcaaaaatcatctttgttttaaaaatgactttttcttcaggtaaaataaaataatttcagttgctattatttaacctgtttgtatgaagagtttaacatataggaaatgaatacataaagataggaaggaattaattgttatatgtagtcatatgtctcttaatgacagggatactttctaagaaatacattgttaggtgattttgtcattgtgcaaacatcatagaatatacttacacaaaccttggtagtataacctactatacacctgggatatgtagtatagtctcttgccccagggatacaaacctgtacagtatgtaactgtactaatgactataaggcaattgttaacacaatggtaagttttgtgtgtctaaacctacacttgggctaccctaagtttatatatttttttaaatttctgttcaataataaattaaccttactttactgtaactttttaaactttttaatttttcctaacattttgacttttgtaatacagcttaaaacacacattatacagctatacaaatttttctttccttatatctttattctgtaagcttttttccatatttaaaattttttgtttgtttttacttattaaacttttttgttaaaaactaagacatgcatgcacattaacctaggcctacacagggtcaggaccatcaatatcattgtcttccacttccacatcttgtcccactggaagatcttcaggggcagtaacacacgtggagctgtcatctcctataataacattgccttcttttggaatacctcctgaaggacctatccaaggctgtttatagttaacttttttttttttttttttttttttttagtaaataggaggagtacactataaaataacaatataggtgctataccattatacaactgacagtgcagtaggtttgtttacaccagcatcaccacaaacacgtgagcaatgtgtcgtactacagtgttaggatggctataacatcactaagcaataggaacttttaaactccattataatcttatgggaccactatcacatatgcaatctcctgtggaccaaaatgtcattatgtggtacatgactgtactaagaaattgatccatctatattccatcaatttgtttagggctttttctggttacatttacctgtgagcccagaaaaccagttttgtagaaattaacttctgtaatgctaggagttaaaaaaaattgctgaacaacttttacattgttaaacatttaaaaacaagcgttctagaagtttatcaaatttcataaaggtgcaaaaatgtaaatgtaaatcattatccagctaatatatatgttgtatttccctagtaggagagcatatgtacctcttcctagttatacaaatttgatatatagtaaagaaacagtaaattctacttcaagtcattttgggaggattaaaaactgaatttctctagtttgaccattgtacagatttatctggcaattttactaaaacctgatttataggttaaacttggtgtatatcatatatcactttactttagaggaattaagatttcacataaatccatttccaggttccaaagaccaggaagaggcttggtttttgtttttctttttactgtctttacagtctccttgacttttcttaggagagaaggtactgagaaaacatgattctaatatttattattttttcttccaacattttcttatgaaacattttcaaatacaaaattgagttttatttaaaacatttgcaaatatactacctagattctaccattgttgttttatatttgctttacttacaacttttaaaagatgctttttataccactgaacattttagcttacatttcacaaagaaaagaaaaaatttaagagactttgcataatgttttaaggggttgcagtaaagaagtgcttcttatattttcttatgcatacaaatcagctgggcttattaaaatccagattctaattcagaaggtttaggtggggaccgagtctgcatttctaacaaactcctaggtggtatttttcttggtacttggaccatactttgagtagaaaagcagtagaggacataaaaagagtcttgttagtcccactttgttgctgtccacttctcatttgataatatcctaaaatagctgtgtctcctttttggtggttgtatgattactacctcagaagtactaattgattcttgctatttgaccttaatactttaatataacacagcattcatatttgatcagaaaactatctggcttccttttataagagatttttaggttttatacagttttgtggccttgggtttttttgtttgatttgtttttttgaaggtatataatatgtaagtagataaacaaatttgatttgtagacatttttatgtggatcatctaattaaaaatggagggatacagtatgaaagaatacttgtacttcttaacagagcactcaacctttcttttacatcctgtttcactgatgttattatgtaatttatgttgctaaactataaattagatatttaatttctgttctttgatttccttttattattaaatggacttgttgatttgcctagaaattaatttgcctttcaaaagtcttattaatcttcctccgttgaaattaatttgatatttgcatgcttctggaagactttaaagagctattccgagtaactgtagagattataaaatgaaatatgggaattttaataaattttacatctccagttactggtgaaaatgtcaagtcctcctttctgcagagtattttgttactcatctgttattcagcttatttatttatttatttatttatttatttttctttctttcttgttttttttttttgagacggagtcttgctttgtcgcccaggctggagtacagtggtgggatcttggctcactgcaggctccgcctcccgggttcacaccattcttctgcctcagcctcccaagtagctgggactacaggcacccgccaccatgccttgctaaatttttgtatttttagtagagacgggtttcactgtgttagccaggatggtctcgatctcttgacctcgtgatccacctgcctcggcctcccaaagtgctgggattacaggcatgagccaccgcgcctggcccttatttgttttttaaacaaaattagtgtgcatatccttgttgtattttatcggcaagttgttttatgccctaacttttggggtcttgatcatgagcctaaaacacgtaaacacccaaaaagaattatattccggttaaaggaacaaaacattcatttagaagttctcatccatgtaaatcagaggctggcaaatattttctgtaaagggccaagatagtaaatgttttaggctttgagggccacaagtggtatctgttgcatttttttttaattatgaccctttaaaatgcaaaaatcgttgttagcttgtgcatagtataaaaataggctggccgcatgctgtggctcatgcctgtaatcccagaaatgaggtgggaagccgaggtgggcacaccacctgaggtcaggagttcgaggccagcctggccaacgtggttgaaaccccgtctctactaaaaatacaaaacttagccaggcgtggtggcgggtgcctgttatcctggctactcaaggggctgaggcagtagaattgcttgaacctgagaggcagaggctgtagtgagcccagatcaagccagtgcacaccagcctggacgaccgagcgagactctgtctcaaaaaaaaaaaaaaaaggctgtggctgcatttggtccattggctgtaatatgctgattcctaattctctgggtaactttagtgtttgattagctactagaagttaggttaaacttttgtattttacaggctaactttaataatcttaaagtaaaacttaacatagttcatggaaaggaaatagaaattttaccctagtactcttttttttttttttttttttttttgaggcagagtctccctctgtcacccaggctggagtgcagtggtgggatcttggctgattgcaacctcctcctcctgggttcaagcaattcttgtgcctcagcctcccgagcagctgggactacaggcacgcaccaccacacctgactgatttttgtatttttagtagagacagggtttcgccatgttggccaggctggtcttgaactcctggcatcaagtgatcctcccatctgagcctcccagtgtgctgggattacagacgtgagtcactgtgcctggtctctagtattttttttttttttgagacggtctcactgttgccaggctggagtgcagtggcgcgatcctggctcactgcaacctccgcttcccggattcaagcgattttcctgcctcagcctcctgagtagctgggactatgggtgcacaccaccacgcccagctaatttttgtatttttagtagagacggggtttcaccatgttggccaatatggtctcaatctcttgacctcgtgatctgcccgtctcggcctcccaaagtgctgggattacaggcgtgagccactgtgcccagctgtactttttaagataagaattgcagggtatatatttttaccaacttaataacttataattttaaaaagctaattacttggctagaatataatgcgttacatattctttacactcagttcagtccatatctgaaaggcaaatagaattattttctgctagtacattgtgtagtccctatgttcctagtgtataaggactgttacctagttcacatttatctgggttgttgacagattttcctggtccctttggacagtgcatggccatgttggcaaaagctgtcaaaattgaaacattgacaccatgagaattgtgtgttttccagtctgctaaaatcaaaagtgggagggttcagtaaggtgaataacagaagcagagttttcggggtatctgttactcctcattcggcttttctgctctctgggggtctcaatttaaatataatgtgaaaattagttttacgaacctaaaaatgttgagtgattcatttcctggttttgttgttaatttctagatatttaaattaattgttagaagaaccccgttaaagaatgctttgcaaaacaacctccttatgtgctatgtctctgtttaatagtagttgagtttgtgtacatgagatcaatattttgaactatagctttttatgagttaaaaattgacggaacagttactgtgcacttgctgtgcaccatggtagtctcccaagtagtggtttttctgcatttcaatagtacatgagataggctgtgggtggcaaggtttcttgagaaagtgagggatgcacagttgggttttagaatacatcttgttcctccatgcccttccccaccaaaaggctggtagtcttgcatttgtatatagttagggtatttgatgtgttgcttccttgacagagttttgcaagaatttgcagatttaacaggaacaaaaacttacttaaaacaaaatctcttagtaaaagcatagtctagcaagatttagaatgatactttggctaacagtactttctctatatggagtgctttgtttccatagcctcacaagtatgttttcagataatagttgagttgaaaatgttgtcaatctcttgattttaaaaaatttacatatttaaagttgtatacttttgttcctacgtattttcagttgttcttaaagtttaataagtgacatttgaaaatgagtatatgtgtataaaaacaaaagtaggctaggcacggtggctcatgcctataatcctagcactttgggaggctgaggcaggcggatcacaaggtcaggagtttgagaccagcctgggcaatatggtgaaacccccctctactaaaaatacaaaaattagctgggtgtggtggtgcatgcctgtagtcccagctactcaggaggctgaggcaggagaatcgcttgaacccggaggtggcggttgcagtgagccgagattgcaccactgcagtccagcctgggcggcagagcgagactccatctcaaaaaaaaaaaacaaaaaaagaaaaagttaaaaaaaaacaaaaaacccccacaaaatgagtatatgtggcaacaagtcctattctcaaaaaaattattgtgtgctagttaagagcttaatgagtagccagtcggtattaaatatctgtttcagctatattttatctttaaaaattatctacagattttggaatgtgaaaaactagtgttttgtttcataggtatatactgtaggcattttaaaaataagagccagtgccagtggtttacagtgtacacaaggataatgttctcatgttctcttgatgtcagtatgactttaaagcatattatcaagaaataactaagtctgaaaaactgtggtaaataactggtactctaaaacctaagtttcttattactaaaaataagaaatggtaaaagtcaccctgtgctgttaattatatgagccactgaggtcctgacactgaattcttggtggtggataataatctcttctttttaattattggcttccaattctctctgcattgctggaaacaaaaatcatatatttcactattggtggtggggatgctgtcactgaaaaagtagacacattcatattgattttagaaataagttaaaatcaaaatttgcttctgctaaattagtagaggaccaatactgtttttctccttcatagtatgttttggtacttctacattgacattataacttttttttttttaaacagaaatagaagtttacattcttagaaaatttatgaaaatatgagcttttacctggtttgtgtgtgtgcgtatatatatacacatatttttaaatttcttacattgattttcaaattgaaagagaaccatttgtgaaagtatcttaacagagctcatgctttacattttacatgctacaaagttattttagtgccttaaattatttatgttgcttattaatgaaaattttggatacataattttttcaagacaaaggtaaaaataataaaccctttccttctgaggattaatgataaatataaactttaaaacgattaaaaaaatttttttagagacagggtcttgctctgttgcccagactgaagtgcagtggtgcagtcatagctcaatgaagcctcaaactcctgggcccaggcaaccctcctgcctcagccttttgagtagctgggacttcaggctcatgccaacatgcctaatttatcttatttttagtagagatgaggtctcaaactcctggcatctcttgccctctcaaagtgctggtactacaggcattagtcaccacacctgacacttaaaatcttttatatacaggtgtaagtgggtatctaacttaaagtgccaacgaatgtagttgaaagtttgtagttggcttagctaactagttaactaaattgattccattaaaaataagataagactgctcttagaatataatgatttttgttattcgttaaatataaatatatcactggatagtatatgttaatgacttgagatacgcattttaacatataatcacgttacttaaatgcctgcctttgaactgaaacttaacattatgaatttaaattaaagtttgactttagaggtaaatttctgtactttactaaagcagttcttaatataattctgagatttctaaaaattagtgtgccctaaagaattgaggtgtgtttttcttaactactgtaggcagtagatgtacagatgacttctgcatgcaaaaattaagccctagccattggtttacttcaactaatacttagttgccaattctctgtgtgtgattgaatttaaaactgcaaatggtactggtgatacattaactttttaggtgctaggtccactttgttacatttggttcagtagaaacattgatgttaccaatctcagaaagctaaaatatgtatgccaatccccaaattaggtaatttattcttaattttaagataaaagaatagaattcccttaaaattaaatgtggagtaaaatataccagctttaaaaaatattcacctttctgttagaagaatgaacataatattacatcttttaatttgcactatatatagattaatatttctgtgtatttctctgtgcccctactttgatggtatgcttttctgaacaaactagcagcacagttaactaagcactttgccccgtttgatgactgcctaattttctagattggaaaatattaaaaacttttatctccatatggccaatatatgattgtacctgttgtcatagctctcttatgtttaagcaagaaaaaccctattaagagtatttaaattagaatggaaggcacacagccagtatgattgaacactgttctaaaaattatttttaagacttgtagtaaggccaggtttggtggctcatggctgtaatcccagcccttaggaggccaaggtgggcggatcacttgtgctcaggagtttgagaccagcccgggcaacatggcaaaaccctgtctctacgaaaaatacaaaaatcagtcaggtgtggtggtgcttgcctgtagtcccagctatttgagaggctgaggcagggggatcacctagcctgggaggtcgaggctgcagtcatgatcgtgccattgcactccatcctgggcaacccagtgagaccctgtctctaaaacaaaaaaataaaaaaagaacttgtagtaaggatacaaaatgctcctattttgtgtgtgtcctttaattcatgatgtttttatattatggtaagcagctctcatttaagattttaataatgtaattaaacatgtacagaagacccagtctcagcttcacttgtataccctggaaatagactgaaaggtgttaaaatttaagataaaactcaaggttccagtttcttgactcacctttgagattcttttatgtttttgttgttttttaacaaaggtttcacgtccatattttaccatttttcttctcattctcccctggaggagggtgtgggaatcgatagtatataaatcacttttttcctaagtcaaagaagtaatttaaagctaacttcagtttaggctttaattccaggactagcaaactaaaatggttgcattaattgacaaacagatgctaatacctgtgtttaggcttgtcataatctctcctaattcctaatttaaaaattttaaaatttaattccattagaaaacaaaactgacttttaagaacaaaccaggattctagcccatattttaaaactgcatcctcagttttattcaaacagtctgatgtctgtttaaaaaaaaaaaaatctcaagctcataatctcaaacttcttgcacatggctttcccagtaaattactcttaccaatgcaacagactttaaagaagttgtgttttacaatgcagagagtggaggatgctttttatacattggtgagagagatccgacaatacagattgaaaaaaatcagcaaagaagaaaagactcctggctgtgtgaaaattaaaaaatgcattataatgtaatctggtaagtttaagttcagcacattaattttggcagaaagcagatgtcttttaaaggtaacaaggtggcaaccactttagaactacttaggtgtagtattctaacttgaagtattaaaagataagaaacttgtttccataattagtacatttatttttaatctagtgggaattaattataattgagacaattttgatggctgtagtagactaatctatatttggcataaagtctaatgatttaatgagtcttaagtaaactaaatatttggaaactgatatttacctttatttttaagggaaaagttttgagataatcagcagcttttttttttttttttttttttttagtagggagaaaaagatatgagctatagtagacagcagtaatattgaatggcccagaaggtgggaaaaagccactcttaaatgtattttttcttttggatattttacaagcaaataataacttctgcctaagttcgccatctcagtggcatcagcagcacagcactttcttatcccagtgagaaacctgggaattttaggatgactcctaccgccctcttttccccctggtttggaagtatccacaaattcctgtgacgttacattctgtgtcttttatgtcatcattagttcaggcccctatcatttcttgttggactgttagaacctcctatttggtttaccagttgctgccatcattcattgtgaaaccggagagatacactttaaagaaatgtcatttttggccgggcgcggtggctcacgcctgtaatcccagcactttgggaggcctaggcgggtgatcacctgaggtcaggagttcaagaccagcctggctaacatggtgaaaccctatttctactaaaaatacaaaaaattagccgggcgtggtggcacgtgcctgtaatcccagctacttgggaggctgaggcaggagaattgcttgaacctgggaggcagaggttgcagtgagctgagaatgcaccattgcactccagcttgagcaacaagagcgaaactctgtctcaaaaaaaaaaaaaaaaagtcattttagctatagaataaaatctcatgttccacatgtgttgcagatagtccttactaccttcccaccactccagctcttttttggtcttatatctaaaaacgtcatcttgcctgaatttcttttgttcttctataaataaataccatgttatttcctaccttcccttgagtcttggctcttgtttggaatgccagtatttttatccctagtcttactaattagctaacactctcatgattccccagtctcctactctctaaaaacctttctttaaacccttagactaggcatggagcccttcctgtgtattcccagaatactattcttaactattatatgcttcccatgttatgttgaaataactaacctcttctgtttcattcctatattacttgacagcaaaatcttagccagaattacatatttttaatctttgcacacccattgcctagtaaggttcctgggacatagtaactacccagtaaatatttattgcgtggaattctcattttcgtttctaaacccgtattaaactctgtcttgctcagaaaatacttcactaggtatcataaagttcatggcagagcttaagctttggatgcatattgtttgtaatatatcatgttcttaagaataggcaataaaattacagttttcaaaaactactacatttattatatttattacaagttggtgttctttattacatgaattttaggtatttcccaaaagtataaaatatacatttgaatagtagactcaatcccaaaagatactacgtggtgtactaatctactaaactcagaaacaaagcatgactggcattaatttttgttgaaatttatgaactctgaatgtttttgaatatcattctgtaaagcaatattttgcaattaaagcaattttgcatgttaaattttaccacaacctctaaaatattgcaaatttaacaatacagtttgaaaagttacacattttaaataacagtaccatgaccagatttaggtggtggttttaattttttattttctcctcctattgtctcaccattagatgattttaaaaatagaattgtttagagtaaaataagtgttatgctctaatttatatttaaaatgaaggtttaagcacgtactattctaaaatttctaatttgtgcaaattatgttttatacagtgactgtaggtgaatgtcacaattgtttgatgtgacgaatccttgtttttcagtacacgtggaagtaattcatataaaagagaagtatacttggtaattaaaaatttaaaattaaatacaatttaaaaaaaaatttatttgacaagctggctgtggtgtgtgtgcctgtagtatcagctgcttgggagcctgaggcaggaggattgcctgaccccaggagtttgaggttgaagggagctatgatggtgccatggcactgtagcctaggcaacagaaagagactccatctcttaaaaaaagtaaaaataaaaaaattttggcacagggacagtggctcacacttataatgccagaactttaggagtccacagcgcgaggactgcttgaggccaggagtttaagaccagactgggcaacgtaatgagaccccacctttaggaaataaatacataaataaaaatttgacaatgataaacatatataaattagcttttcttagtcctgaaaaagataatgttatgtgtatgtgtgagaatgattagttctcatatgagaaaaaaagaattcattgctctgtgtaggttgtgacatttccttcacgattgaaattaattaatttttttttattacttatttatttttaaaatagagacaggttcttgctgtgttgcccaggctggtctcaaactcctggcctcaagcagttctcctgcctcagcctcccaaattgctgtgactgtaggtgtgagccactgcactgggccaaaattacttaattttaacaagatgatgtagagaggagagttcattgcaacataagcctagaatctttgtcagaatcttaggaagtaatgttttcaaattctgtgttttcaccataaaatgtgtcttctctgtgtccatcacatggtttttcattgttttctgctttaccattttagtaccattggcatttttcttcattgtaaaagtagtagaaatggagtagattacataaggatgtgatcagagggaatttattcattcagggtaagggagttagatcctcttttaagattctatcacattctaagggtttatgattctaaactgtcaagtaaattgtcaagtgctggcaagctacagaataatttttattgtatcattggaaattttcccctctatatgtgttaaagagtttagcctgaagggatacatacacatacatatatgtaatcaaaccttgatggtattgtattgctgataaattatttcttaccacttttcctttctcctgtgggagaaacaaaagcatatgtttgtgtagtatcagtaatgatattagagagtgggaaacatcagtgagtgcagtttggggactttattggagactttcactagtgctcaaataaataatgctggtttttatcctactgtttgcttaatgtggactagcctcttattcccattctatgtttacctctcttaaaatattggtcacgctttcttgaattatagatctattaggaaaattcatgaactgtagctaattttcattgttcatgctccagatttattttgaaatatcgttaatcttagtagtacagtaaaggagaaataccacttaacattttttgtttttttttctttgagacagagtcatgctctgtcacccagtctggagtgcagtggtgctatctcggctcactgcaatgcacttcgcctctccgggttcagcaattctcctgcctcagcctcctgagtagctgggattacaggcacctgctaccacacccagctaatttttgtatttttagtagagacagggtttcaccatgttggccaggctggtctgaaactcctcacctcaagtgatccacccgtcttggcctcccaaagtgctgggattacaggcttgagccaccgcaccccgcccacttaacattttaaattaatttcaagataatatcacttgaatatttttacacatataatttttttaatacatttatttacacagtttataatatcctacaaagtgattacaatgagtaaaaacccagttttcattgttcctaaagtggcttgatttatacaacttaatgtgttgggtatttgtttctaagactccctctgctgtctaggtttggaagtattgtgaggttaacagattttctttttatagttactactcagttgaacaggctttaaaatacagagagaatcatattttttcttcattttttgcttttatttatatttttcttttaattggagacatgacaagaattgacttgtgtatggatcttgcataatttaagtactgcaggtttaaaatctactaccagtttgagagtgccatttttcacactgtagattattaggttgaaaagtattatggcttaaaatcgcttttagccattaaatttaaataaccttgctttaatcataaatagatggtggtcacaatgactaactgttaaactctttgaagacaggatatttggctttatatggcaagcttttgaatacaacagaaattaaaactttatgggatagaaagaatctcctccaaattggtaaactataagacctttcaaatgatttagctaatttctccacaaatctgaggtattagtgttttttttaaagtggtattctcctgtgttggggtcactttaaacctttttcttaatgataaatatatgaattgaaactaatcccttaatatatatcatttgaaaactgaaataatatgtttagatactgtttacttgttgataaattattggaataggatgttcgaatactgtttacttcttggtaaatttttaaatccaatggattttacgtaagtatagaactggagctcaaatactgttactgtgtgtgaagatatatgaacatagtttacagttgcatggcttatatctaaagtccagaaacataaggacaattaagtgtacacacacacacatgcatttggattttgatgacttaggtttgccaatgtggaaaaaatagtagcaaattaagttctcctgtgaaaaagtcgttaccttatttaaaattctgtgccattggttatccttgtcttttgtgaaaattagtgttcctgtttataatattgacaaaacacctatgcggatgacatttaagaattctaaaagtcctaatatatgtaatatatattcagttgcctgaagagaaacataaagaatcctttcttaatattttttccattaatgaaatttgttacctgtacacatgaagccatcgtatatattcacattttaatactttttatgtatttcagggtgttgatgatgccttctatacattagttcgagaaattcgaaaacataaagaaaagatgagcaaagatggtaaaaagaagaaaaagaagtcaaagacaaagtgtgtaattatgtaaatacaatttgtacttttttcttaaggcatactagtacaagtggtaatttttgtacattacactaaattattagcatttgttttagcattacctaatttttttcctgctccatgcagactgttagcttttaccttaaatgcttattttaaaatgacagtggaagtttttttttcctctaagtgccagtattcccagagttttggtttttgaactagcaatgcctgtgaaaaagaaactgaatacctaagatttctgtcttggggcttttggtgcatgcagttgattacttcttatttttcttaccaattgtgaatgttggtgtgaaacaaattaatgaagcttttgaatcatccctattctgtgttttatctagtcacataaatggattaattactaatttcagttgagaccttctaattggtttttactgaaacattgagggaacacaaatttatgggcttcctgatgatgattcttctaggcatcatgtcctatagtttgtcatccctgatgaatgtaaagttacactgttcacaaaggttttgtctcctttccactgctattagtcatggtcactctccccaaaatattatattttttctataaaaagaaaaaaatggaaaaaaattacaaggcaatggaaactattataaggccatttccttttcacattagataaattactataaagactcctaatagcttttcctgttaaggcagacccagtatgaaatggggattattatagcaaccattttggggctatatttacatgctactaaatttttataataattgaaaagattttaacaagtataaaaaattctcataggaattaaatgtagtctccctgtgtcagactgctctttcatagtataactttaaatcttttcttcaacttgagtctttgaagatagttttaattctgcttgtgacattaaaagattatttgggccagttatagcttattaggtgttgaagagaccaaggttgcaaggccaggccctgtgtgaacctttgagctttcatagagagtttcacagcatggactgtgtccccacggtcatccagtgttgtcatgcattggttagtcaaaatggggagggactagggcagtttggatagctcaacaagatacaatctcactctgtggtggtcctgctgacaaatcaagagcattgcttttgtttcttaagaaaacaaactcttttttaaaaattacttttaaatattaactcaaaagttgagattttggggtggtggtgtgccaagacattaattttttttttaaacaatgaagtgaaaaagttttacaatctctaggtttggctagttctcttaacactggttaaattaacattgcataaacacttttcaagtctgatccatatttaataatgctttaaaataaaaataaaaacaatccttttgataaatttaaaatgttacttattttaaaataaatgaagtgagatggcatggtgaggtgaaagtatcactggactaggaagaaggtgacttaggttctagataggtgtcttttaggactctgattttgaggacatcacttactatccatttcttcatgttaaaagaagtcatctcaaactcttagttttttttttttacaactatgtaatttatattccatttacataaggatacacttatttgtcaagctcagcacaatctgtaaatttttaacctatgttacaccatcttcagtgccagtcttgggcaaaattgtgcaagaggtgaagtttatatttgaatatccattctcgttttaggactcttcttccatattagtgtcatcttgcctccctaccttccacatgccccatgacttgatgcagttttaatacttgtaattcccctaaccataagatttactgctgctgtggatatctccatgaagttttcccactgagtcacatcagaaatgccctacatcttatttcctcagggctcaagagaatctgacagataccataaagggatttgacctaatcactaattttcaggtggtggctgatgctttgaacatctctttgctgcccaatccattagcgacagtaggatttttcaaacctggtatgaatagacagaaccctatccagtggaaggagaatttaataaagatagtgctgaaagaattccttaggtaatctataactaggactactcctggtaacagtaatacattccattgttttagtaaccagaaatcttcatgcaatgaaaaatactttaattcatgaagcttactttttttttttggtgtcagagtctcgctcttgtcacccaggctggaatgcagtggcgccatctcagctcactgcaacctccatctcccaggttcaagcgattctcgtgcctcggcctcctgagtagctgggattacaggcgtgtgccactacactcaactaatttttgtatttttaggagagacggggtttcaccctgttggccaggctggtctcgaactcctgacctcaagtgattcacccaccttggcctcataaacctgttttgcagaactcatttattcagcaaatatttattgagtgcctaccagatgccagtcaccacacaaggcactgggtatatggtatccccaaacaagagacataatcccggtccttaggtagtgctagtgtggtctgtaatatcttactaaggcctttggtatacgacccagagataacacgatgcgtattttagttttgcaaagaaggggtttggtctctgtgccagctctataattgttttgctacgattccactgaaactcttcgatcaagctactttatgtaaatcacttcattgttttaaaggaataaacttgattatattgtttttttatttggcataactgtgattcttttaggacaattactgtacacattaaggtgtatgtcagatattcatattgacccaaatgtgtaatattccagttttctctgcataagtaattaaaatatacttaaaaattaatagttttatctgggtacaaataaacaggtgcctgaactagttcacagacaaggaaacttctatgtaaaaatcactatgatttctgaattgctatgtgaaactacagatctttggaacactgtttaggtagggtgttaagacttacacagtacctcgtttctacacagagaaagaaatggccatacttcaggaactgcagtgcttatgaggggatatttaggcctcttgaatttttgatgtagatgggcatttttttaaggtagtggttaattacctttatgtgaactttgaatggtttaacaaaagatttgtttttgtagagattttaaagggggagaattctagaaataaatgttacctaattattacagccttaaagacaaaaatccttgttgaagtttttttaaaaaaagctaaattacatagacttaggcattaacatgtttgtggaagaatatagcagacgtatattgtatcatttgagtgaatgttcccaagtaggcattctaggctctatttaactgagtcacactgcataggaatttagaacctaacttttataggttatcaaaactgttgtcaccattgcacaattttgtcctaatatatacatagaaactttgtggggcatgttaagttacagtttgcacaagttcatctcatttgtattccattgattttttttttcttctaaacattttttcttcaaacagtatataactttttttaggggatttttttttagacagcaaaaactatctgaagatttccatttgtcaaaaagtaatgatttcttgataattgtgtagtaatgttttttagaacccagcagttaccttaaagctgaatttatatttagtaacttctgtgttaatactggatagcatgaattctgcattgagaaactgaatagctgtcataaaatgaaactttctttctaaagaaagatactcacatgagttcttgaagaatagtcataactagattaagatctgtgttttagtttaatagtttgaagtgcctgtttgggataatgataggtaatttagatgaatttaggggaaaaaaaagttatctgcagatatgttgagggcccatctctccccccacacccccacagagctaactgggttacagtgttttatccgaaagtttccaattccactgtcttgtgttttcatgttgaaaatacttttgcatttttcctttgagtgccaatttcttactagtactatttcttaatgtaacatgtttacctggaatgtattttaactatttttgtatagtgtaaactgaaacatgcacattttgtacattgtgctttcttttgtgggacatatgcagtgtgatccagttgttttccatcatttggttgcgctgacctaggaatgttggtcatatcaaacattaaaaatgaccactcttttaattgaaattaacttttaaatgtttataggagtatgtgctgtgaagtgatctaaaatttgtaatatttttgtcatgaactgtactactcctaattattgtaatgtaataaaaatagttacagtgac

SEQ ID NO: 42 - protein, 464 aa, Homo sapiens
  REGION 1..464: note = N-myc proto-oncogene protein
MPSCSTSTMPGMICKNPDLEFDSLQPCFYPDEDDFYFGGPDSTPPGEDIWKKFELLPTPPLSPSRGFAEHSSEPPSWVTEMLLENELWGSPAEEDAFGLGGLGGLTPNPVILQDCMWSGFSAREKLERAVSEKLQHGRGPPTAGSTAQSPGAGAASPAGRGHGGAAGAGRAGAALPAELAHPAAECVDPAVVFPFPVNKREPAPVPAAPASAPAAGPAVASGAGIAAPAGAPGVAPPRPGGRQTSGGDHKALSTSGEDTLSDSDDEDDEEEDEEEEIDVVTVEKRRSSSNTKAVTTFTITVRPKNAALGPGRAQSSELILKRCLPIHQQHNYAAPSPYVESEDAPPQKKIKSEASPRPLKSVIPPKAKSLSPRNSDSEDSERRRNHNILERQRRNDLRSSFLTLRDHVPELVKNEKAAKVVILKKATEYVHSLQAEEHQLLLEKEKLQARQQQLLKKIEHARTC

SEQ ID NO: 43 - DNA, 196424 bp, Homo sapiens
  misc_feature 1..196424: note = BCL2
  source 1..196424: mol_type = other DNA
acccctcgccgcaccacacacagcgcgggcttctagcgctcggcaccggcgggccaggcgcgtcctgccttcatttatccagcagcttttcggaaaatgcatttgctgttcggagtttaatcagaagaggattcctgcctccgtccccggctccttcatcgtcccctctcccctgtctctctcctggggaggcgtgaagcggtcccgtggatagagattcatgcctgtgcccgcgcgtgtgtgcgcgcgtgtaaattgccgagaaggggaaaacatcacaggacttctgcgaataccggactgaaaattgtaattcatctgccgccgccgctgccttttttttttctcgagctcttgagatctccggttgggattcctgcggattgacatttctgtgaagcagaagtctgggaatcgatctggaaatcctcctaatttttactccctctccccgcgactcctgattcattgggaagtttcaaatcagctataactggagagtgctgaagattgatgggatcgttgccttatgcatttgttttggttttacaaaaaggaaacttgacagaggatcatgctgtacttaaaaaatacaagtaagttctctgcacaggaaattggtttaatgtaactttcaatggaaacctttgagattttttacttaaagtgcattcgagtaaatttaatttccaggcagcttaatacattctttttagccgtgttacttgtagtgtgtatgccctgctttcactcagtgtgtacagggaaacgcacctgattttttacttattagtttgttttttctttaacctttcagcatcacagaggaagtagactgatattaacaatacttactaataataacgtgcctcatgaaataaagatccgaaaggaattggaataaaaatttcctgcatctcatgccaagggggaaacaccagaatcaagtgttccgcgtgattgaagacaccccctcgtccaagaatgcaaagcacatccaataaaatagctggattataactcctcttctttctctgggggccgtggggtgggagctggggcgagaggtgccgttggcccccgttgcttttcctctgggaaggatggcgcacgctgggagaacagggtacgataaccgggagatagtgatgaagtacatccattataagctgtcgcagaggggctacgagtgggatgcgggagatgtgggcgccgcgcccccgggggccgcccccgcaccgggcatcttctcctcccagcccgggcacacgccccatccagccgcatcccgggacccggtcgccaggacctcgccgctgcagaccccggctgcccccggcgccgccgcggggcctgcgctcagcccggtgccacctgtggtccacctgaccctccgccaggccggcgacgacttctcccgccgctaccgccgcgacttcgccgagatgtccagccagctgcacctgacgcccttcaccgcgcggggacgctttgccacggtggtggaggagctcttcagggacggggtgaactgggggaggattgtggccttctttgagttcggtggggtcatgtgtgtggagagcgtcaaccgggagatgtcgcccctggtggacaacatcgccctgtggatgactgagtacctgaaccggcacctgcacacctggatccaggataacggaggctgggtaggtgcacttggtgatgtgagtctgggctgaggccacaggtccgagatgcgggggttggagtgcgggtgggctcctggggcaatgggaggctgtggagccggcgaaataaaatcagagttgttgcttcccggcgtccctacctcctcctctggacaaagcgttcactcccaacctgaccgataacgcctgccatctaaaagtctttaacttgcttgctagtcgtggagatccaaagatctagcgtttgtaatccagtaggatgtggtggtaaatggtaccccttcagtgtttctcaagctgaaggtccaggagtccccaggaccaccgtttcctggcttgagcagcttgttggaaccggagggaggtttcagggactgcttatgaaccagataccaggttgggtcttgacagtctgcatcccaaacaagctcccctgaaacaagcccgttgtacactaaaattggagaacaacccgattagaagaatagactccacagaagaccaagggcatcatcaatcggtaaaattttccaaaagaggaaaaccaatgtaagtctttttccctgaaaaacttagttgtgtttgtaaagagctaagttgacattccaaagtccttggactggaatctccagtgtgtgccatgttcccagtgggcgtgatgaggtgtcctgaggagtatcaggctatggctttgctaccttgtcagtgacagaatttgcatcggctgcattctttgtattctataatttgtgtatggtttaccagtttgctagaatgttagaatcttttgtttttcaccactcagagtggacctaattttgtggtcggctgaaaaaaatttgcatctaggtatctatgtaaagtgtagaagaattgattcttagctgtggattatcttacccttactttagttgaagtgattgatacctgtggctttgaagaacatttgtgagatgatctttttctcgtactgtgctagatagagctttcatcattataccatacaattgtacttttctgagattctttgttggagggggtttagttcctaagagtcaaggattgtaatggagatctatatctcatatctaaaatgatgaatttatgaaaaagtaattcttgtgtgaagttttttttttttttacactttttgttttaatctgaagagttatctttgaaaaacaggatgcaattcagtgcttccttttatagcctcttgggagaatgactaatgtcattattttataggacctaacaggagcaaaaagcctagaaattactgcaagtggattagatgtcaagaagcacaccacatgtttttattacattttacaaagtgtgctcatactaggaggccaaatagagaaaaggccaagaaaagtagatgattgatgtgaacatctgatcttatttgaccaaagttgacaaaatattgatgccactgtttggtgtttaaaagtaagattaactaaaatgccccaatttaaatttctaaaatttaaatcctcttcttgaattgtttgtttgttgagatctcacattatcagatctttagtaattctggaagaatttgctaaagggtgaaaagaatatttttgttaaatatttggttaagtaggtggtttgatttttaatcactataactaaaggggttgggacttccagattcccaaaggatccttttaaaccaaagtaaaactgatttaatagttttactatttcacatttttgtgaaaaattcacacttacaaattttctttctacttgaaataaatccaaggtggtaactggtatctgtctatcaaataagttaataaaaatgtgggaaacagagacacatgtttatgacagaaattaagatacaaccttgatatttgttgctgaatttcagtgtgttaccctctcatgtaactgaagtttctttttaagtaaaggctcacttttttctttttgtgaaacagagttttcatagtagacctatctttgtggtcaacaggtatctgaggttgataaatgtagaggctacattttatgatgccaaaccacaatgacataccatagaacatgataaaaattttttgacaaaactgcttctagtaaaaataaatcatgtagaagcacagatggttgatggtaaaatatgtaatagctttcagaacaatgcatagatggtgactatataggaaaacaaaggaatttagagaaaaaatatatatatataccaggaaatgcactcataggacactttggaataaaagtggtagtgtttgagaatgatgaatgatttgcctatcatttcaaatgtgcattattaatctaaaagtcattttaggcatttggcatacagacagattttcttcacatttacaccaattggggttacatctctaataatatgttgtattttatagtgtaaggtagtcttaatggtaaagcttcagaagagagctagcatattttcttggcatgtgacaataatctgcactgtccccagggctccgtggattagcccatctcctgaatactacactgaatactccaggctttagactgcaagtcatttctttttctttgctgctgctcgtagaaaattggaaccttgtgaggctgaggaaatctgtttgacttttgtgttccataacatggataaatcaggtccttggaatgatcagcctctgatagattgtcccagaagactacaaattaaataaagactaaagaagtaattggctgtagagtggagtgtggatttattcctaggtctgaataaggcattgtgtggcatccagagagaggcaggacagaggaagcagtgagagagaagcaattctagaaaatgtggataccttgctgctcagtgtggcttatagacagtagcacatgcatcccccggagctttgtagagatgctaaagctcagctcccaccccagagctactgagtcagaatatgtggtttgtgtgcacgttaaagttagcgatgctggctaccatccttggttcctggtggcatcttttaggaagagttgctacctgggatggattctgcattgtccccttccagtggccttaaagatctatagtgttacttggaataccgagtatttcccaggtgtccactattgtgatctgactttaggaagacataaattggatgaaggagagatagcaagcaggtagatcaactataagcccagtcttctcatgaatatttttcgtagtagttatatagtttatattggcatcactggtcccattaaaaagtaagatagcttttcttcaattaaaggcaagagaattagctcttttaatagctctgttagttattattttatcccctcataacacagtttaaattctgtaaatgactttagtgaccttgcagcttctttaagacaaagggactcttgcaggcaagggattgagttttgggcaggtgatggagagtgaccctctaaactgggaactgtgacgacattcagcttcatgtcttaggagagagtgagataggagccactagaagaatgagatgattcagacaagagattgtaggagattggctttattctgttgacaagatggtaatccgacttattttttggttttttggtgttggtggtttaggaagacaggaacttctccacacccggtagagttcagctgccttttcattagtcagcaagcagtttttcctttctcaaggcagtccacatccagcaaaacatttgattaactggaaagcaataccattctcatgccagtgtacaaattacatgaaagagcatcatttttctagtgtctgaggattggctgcttatggccaattttggcagcaagacgataggattaaaaatagcttgaagatgatctagtcttaaataatatatttcatgatgaactttccttgggaaagtgcatctttctgcctacaagaatcacatgacccctttcaataatttatgtagtagagaaaaacacactatttctcatagagttttcagtcatgtgctgtggtgtgattgtttctggacattcataaaattttatagttaactgaattctcttttctgttttgttgctatttaacgtccattgaaaacatggctttcttttgcgcattctgttactttcagctgtactttctaataagaatggattgccctttttagcaatctttgattgaactggtacatttcagattacttaaatgtcatcaggccacacagcataccaggtaacagaaagccataaattaaaaataaaaaaaaggcaagcaaaattcttgttgttttttcttatctctgttcccagtcctattgcgctatttggagggatgatacgcccactcatgagcgagtgtgtgggtgctgcatgttaacagtggttcttcccacccaacatacctccgcacccttttctaaggtcactcattgtgtcttagcagtagtttagcaaagcagtatctcagcagaagtgcatttgtgctagaaaacaacactgtctttgtagtgtacaagtagaacgttttctttttcccccagagatatattgtatttgagattcaaaggttctgttcaacctttttaaggtaatctaatatcaccttattcaggtataacagtaacttgtcaatctggtcatcctttctgtcaaccacatgtaggagaccactcagtgaatttactccactgtgaattttctctttcatccctcttggtttggcttaatcaaccttaatgtttgatgtctaagcaggattaatgatgaaaatcatccaaggactgacagttattccacagatgtgattgccagtcttacatgagtcctgccttgggttaggttggaggcacggcaaggagagctttgcttctgccctggataaactcacaggctagtgttgcaggcatcttaataaactcgtagttatcatacagcctgataagcatgatcctagactcagagacttagaggaaaaaagcaaataactataagttattttgcatgtacttcagccttggtctaagaacgttatttctgaccatatggctgttcatgtgtgcattaggcctaatttaaacagggccaaaatgtagatactttaaaaaatactgtgtaacgtagacatatgcttaagagaactgaaaggcagggggagttcccttgttaaatattaacccactaagcactatttatgcatactaagaagacttaataaacaccagtctacaatttctaaagcatttcattaattctttttaagtaaaagacaatcaaggctccgattagactgactggaacagggtaatttgaagaactatctttcttaaataactcttgtatgccaaaaaatacaagtaggttttgaaccagagcgggggctcttcctttgagcaggggaaaaaaaagcttctgttttgttttggtttgaggttatattactgttctatttatcaagacacttctacgatgctagttacagaaattcacagtccattgtaacactggcatttgccttcggacttttttgggcttgtggtctgttcgtttaaatggagactgtaaaactttcaaaatgccaacaaagctgttttcacttaaaaacatatttttatagattgtcacttgttgttcttatatatgcccaattctgtatatgctatagcactatttctctgccctccatttgccagacaaaagatacacccatctgtccttcagtgtgaataaggattgaatgattattcctctctcttccaagccatgggactttctcataggtgccaccacccctgtgaccatcccctacctgccttatcattccaccggtgagggacctctcaggtgtagctccttgttaacttccaattagtgatgggtaggatttacctgaagaaaaccgtaatgcgcttagatactagcaaaagggagcagaagtggggagtctaatcaaagtgagaggataaccctcaccccaaacttgctgcaggcagctgggcaggtcaaaattctgtgaccagacactatccttttcctctagtgattataaactttaacctgtgcagagaaaagatagtatctgctggcaaaatttgtacttactttgattcctctagtgcaagattatagtggggttatacctgagacttcaataaatgtttgactaactaaactaaaatagcttagggtaaggactacttccccaaacgcccttttaaacatgtgagaaagggaatctccctgacatactggtatggccatttgtagcaatatactgagagtgacttgggtgattttctggggcgatcaaccacattccatgagcaggttaactgtggaagacacctgcccttgagcatcgcgtttgggccacatgcgtcaatggggaaatttgtgtttccattctgcttcttgttttgccttcacaacttcagggatagaagcgtattccatttttagttaataatcagctctctggggcttccatgtaatgagtcagaaactgatgactgactccactctgctcattatcatgtctcccaaaaacaacccgagaacccactgtgtcaagtgaagctttaatttttcaggggaggttttctccattgagaccaatacatcttttcttgtgacagatccagttaccatatttccttatttttaactgtcgaaaagacagttaagctgcaacagagtatggtgagtttaccaattttaatacttgaagcaccaaacaaaggatcagtgttgcaggctgtctcttcttgactttttccagctctccttagcagataaccaggatgatattttttctgctttacaacatgatgaatgctatatctctatattaactctgaaattgaattgcagccaaatattcctctcagctgcattagaattttctaaaagaacatgagacacataaacttagtcttcttagttcaatgctatatctcagatatattgatatctgatttacaattaaaataggaataaaattaagtacaaattatatcatcagctttaaatattgatttatcttcttgaaaaaaaaaaagcgagtccataaaggatggcagcattggcatttctggatgtaaaatttcagggctatctcctagccatatcctttatggattcctgccagcatctttaaaaacacacacactgaagacacacagagaggttttgaggtattttataacaaaattataagaacagggagacaaagccacttactaaacattaaagtgatagtataagaagaaaatgatttgaagaagtcctaattgagggaaatgagcaattgtccacaaaacttaaccctgggttcccaggaaccggggtagtgatggtcatggagaggggttttagaatctggttatttaggaaaacatgcacactaacttgtttcattgaaaaaaacatttattgaggccctacaccatgcaaagctctatgctaggtgttttagttaagcgaaaaaatgtctaagataacttttgccttcaaggaacttaccaatcagtaggagaccaagacaaggatacaaatcactgtaatcctggacaatgtgtagtagacagagaggcccaacccagctacagtggtatctgaagagtttcatgccggagataatgttgagacaagttttagagaacaggcaggcgatacggggagagggtctttcaggtagtggaaactggaggcgtcaaagcaggcatgaatgcgggaggtgtgtttggggaattgtggagagtctgatttgactggggcatggagaactctcctgagataaatccatagttttgagaacttaccactgcatactaagttgtgaaacttgtatagacagccctccctatctttgggttccacatccatggattcaaccaactttggatcaaaaatatatggggtagggcaggcacagtggcttaggcctgtaatcccagcactgtgggagctcaaggtgggtggatcacttgaagtcaggagttcaagtccagcctggccaacatggtgaaaccctttctctactaaaaatagaaaaattagccaggtgtggtggtgggcgcctgtaatcccagctactcgggaggctgaggcaggagaattgcttgaacccaggaggcggaggttgcagtgagccgagatcgtgtcactgcactccagcctaggggacagagcgagactctgtctcaaaaaataaataaataaacaaacaaataaataaaataaagtatataggaggatgtgcatatgcaagtactactcatttaatatcagggacttgagcatcttcagattttggtatccactgggggttcctagagccaatcccctgaggttactgaaggatggctgcgtttaactgtaccagggatgttgaaaggatgttgcaaaggttctcagacaaggcaggatgtgtgcgtgggaggaagattgacagtgactgagcctggacgggggagaccaggtatgaggtctgaagcacctggaacagaaaggacaggacagatgtgggcacactgcacgtgtagaatcaaaggactgacagcaggtcgaatgtgaggaatgagggagggaaagaatcaggactcaagtgccatcctggctgcctcaaaaaatgatactgtcttccagagggaaaggaaagataacaacagttactgctttgtggcgtacatgtgatgaatttcattttggacattccagtaggatatccaagtggaaatgcccagtaagccttagacataaggatctggatctcaagagaaaaattgaggttgaaccataatatgtctttcccctcgaatcatgtaggtttctcttttgccttctttcattgccctaagtggtcctaaatgctactgctgatgctgtcttagtttgcgactgttgtttgcaccccaccttttcccaaaggtaatctgtagacttgcatggattgggttaaggtggttaacctgcagctttgctgttcaaagcttggcttcccactaccagtttgccaacttaatgagtacttcaacttgagtcaaattagtattgttccaaatatcctaatagtatcctctatgtgtgactctaggtcttacaaaatcaaggtgtcctttctcattgagacttccttattaataaaatatttcttctattaaattcaacctggcaccaagcatagtaggtaataggcacacacaatgactgtttattgaatgaatgaataaaatgattatgttagggcattctgagcaattcatcctaagcagctaattttctcctacttcttttattatagtgtgtgtttgtgtgtgtgtgtgtgtgtgtctgaaatgtcccatcctacaggttcattaatatttaatagaaatgaaagaagaaaaatacctattaagtgttttgatttcatccttttcattgaattgaaaaagtatatcatttattcctgaagagaaatctagattttgctctatattaaacatttgacatttattggtccttaatgctaatatagataccagcctgctggttgtcacattctatctgtttatacgaaggttgtagacacacagtgtatgtacatatgcctagttgctctcattccttttgtttcacatctcaagcctaacccagactgaaaaggttttgaaggctgagattattcatcaccccatcattatagaaagcagggctggcccaaggttctcacagtgggagcaaggtggattttaactctgatcagtgttgtagctcaaatataaaaagaactgcagcacaaaagtcacaaggataaatgatcccctcgttcttctcccataaaaataagcagccaattgaaggtggaagtcagtacagtgcggcattcccagaggcgacagaacctaagattccatttctaaagacactgctcaacaagaagaccacctgggatgtcttacataaaaccattggcctggcagcttttggctgagttctctattctggttcaagccagcatcacagcctatctgtggttttaacaactgatggaatttgtattttgagaaccctcatccgttagcatgaagcaaactcaaagcattgttgctcatcagttgtcatctgtttgagaaagattttgatttgtttacttgtagtgaagcttgaccatacttctccaggggctttttaaaaagatgaatgtgtcagcttgtagatttgtccccatgaatgaaaccacaagcaaattctcttctctcttccagcctcccttcctccctcttgtttcttcagtggccatctgtgcattatgttcccattgccaggccctcttcaagcagcttatctatgagtgaattcagaaacttcaaattataaaggacacccagataattggcctgttctccaaagtatctgtcccctgtgctgctgccagattccttcttaatgaatacatccagtgacagtgggattcttgagcttgtccgtatctgtgagaaaatgagctctcctgctttgtaacagcttgtggctcagggaaaaaaatgacagccattgcacaagtttcctttgaatgtagttttctttcccataaatgatactttgagaatacagttaaggggttattagttttctatttcatgcttggcctgtgtgtgagaataacacaagctgtcactgcaaatcagtagctaaaaatgctttgtctggttaatgtgaacatttaatatttggctcaattaaaaattaaccgatgaaagtacatgtcattggaatttgaaaataccttttgtacggaatacttaaagggcatcacccatgactaaaccagtgcttttaaaatatggagaatatggggaaatttaatatgagttgggatacttgactcttttttaaaacctctctacctgtttggcacaacagggtattgataaagagtgggctcattgttatggcaaaggattcacttgcatctctgtgtttttaagtgggtaattgtttttttgcactcagtcacatgattaaagcagacagaacaagagatcagttattcatttataccatacttttaaaaaaatattgagccaggccctggggaagtgggaagtgagagccagagcggcgtggctgatagtctagggcagtgctatccaatcttttggcttccctgggccacattggaagaagaagaattgtcttgggccacacgtaaaatacgctaacacgaatgatagctgatgagctaaaaaaaaaaaaaaagcacaaaaaaacctcataatattttaagaaagtttacaaatgtgtgttgggctgtattcaaagcctgccatggattggacaagcttggtctgggggagtgaagaccattcaacatcagctgcaggagagcatgtttaaagctatgagaagagatgcagcaatagtggtggcatttattggagtcaaggaagtcttcccaggaaggggactgaagcctgaaggatgagcaggaatcaatgtagtgaagtgggtgggaggaaccaagtgtggccccaggcagaacttcaggaacaaaggccagaggcaagcggccacatggtggactgcaggagctgaggagttcagcctggctggagtggagagtgcaagtgggtgggtcagaaagatgatgctagaggtggcccaccctggaagagtttgtttcagatacgtcaccctgactccactccagaccgttaatgagacgggggagaaatcagtgaccagatagaaggctctttcagcaaacgggcaagagatcaagtgcctgacctagaggaatggtagtgggaacggcaagaaattgctagctttgcacaatgattaggactagagtggagagattttttggaagaggtaatgattgactgaatgctttagaacatggctcagttcttcctcagctttgctggtctttctgtacaacttggaaagaatgtggtcattgttctggttatatataaatgcttttttgtgttttttgtttgtttgtttatttgtttgtttttggagataaggtcttgctctgttgcccaggctggagtgcagtggcaccatatcggttcactgctgcctcgaactccggggctcaagtgatcctcccacctcagtctcctgagtagctgggactacaggtgcatgccaccacacctagataatgtctgtcttatctttttttgcgacaggatctcactttgttgcccaggctggtcacaaactcctggcttcaagcaatcctcctgcctccgcctcccaaagtactgggattacaggcatgggtcacctcacctgaccttatacaaatatatattttttcttatttcacttttaaaaaattgtctggttaaaaactatttttgttagaattcaccgtgtgataaatctttattaactatcagttaataaaagtatatttgaggaaagaattcaattatgaaaggcagttttcatagaatttttttccgggtgaaaaaaatgacagtggtttcttgcctttacgtaggattttaaagtttctaaaaaaaaattccatatctgttggcccatttgatcttcacaacaaccctaagcaaggcagatattgtattccaacttctccctactttcctccccacacacactgttagttatttgtttatgcccatgtaaagaagaaagttcgcccaacaaaggtgtgtacgagccaataagcacaggaagagctgatattcattccctgggttgggaatcccgtagatatttctttatcctgtgctgcttctctggatatgtgttcataaagacacaagattgcttagtagagactgaaatatattgcattttgaaaactagtatactctactgctttctgtgtcaaaaatgttcagggaaattggaatgcagtcttttgtttctggttactttcccttcttcgattcagcctttgcagcgtttctcatgcttgcagcagagggggatctagctgcttccatttggtgcctaccatcagctcaagaccctgtgaggatgcgcttatgagccaggcgggcttggacatgagctgaagggacagtagtaggattgacgtgcgaggtctctaacacttgaaggccctgtaaaacagcccctttcaacaggggccaattggaattagatgaacatgtgtgactgtttttgcttgttgacacctgactagcaacggtgttatgttagcatgctgtttgctgcctttatttctttgaattcctcagagtccttatttattattttcaaaggttgtaattagctttaatcggaagtgcccgtaagtgtagtcctgtaaatgttgctcttccatctttcttttttcttttcccaagaaaatgccgcattggaccatcaggaaaaataactaatgggtactaggcttgatacgtgggtggatgaaataatctgtataacaacatccaacaagtttacctatgtgacaaacctgtacatgtgcccctgaacttaaaagtttaaaaaatttaaaaaggatgtgaaacaaaaaaattaaaagaacaaacactaataaatatgaagaagtccttcagagtctttaaatttgctcatagagcattgactgagacactatctcctttagtaactaaataaaattaaaaaaataacactgggctcctctttttaggtgaccaaaaatatttggtacatgttttttgaatgttgaaaatggtggagccttcatcagtagggtttccgcagtagtaaagggcatgttactgcaagttcattcaatcaacaaatatttataaatatttgtttactgtaaagagcctactctgggccaatcattgttctaggggctggagctataacagaaaacatgacaggttaagaactctcccatctcttgtgaatcccacattgtgaggaagtcagaaaagtaaacaacttaaaaattaacaatataacataagggccacaaagtaatgaaaacagggcaatgcagtgcaagggtgctgatgggacaatattaacttcttccttggtctttgagatttttcaagcagtactacaagtttacacagaggagatttaatgggtttttcttcattaatagttgaaaacagtgttgtaccttaaaaataataaatgtattagtataatatagcccttacatcagtttaaaatgagttaccatgaacaatatgaacttaaagagacttttactatttttggctaaaatgtttagcgcaatcttttccttacctactcatccttctcatttccccatttccatttatgacaacattggtcattggcctcagtcaccgaaagtcaggaggaaggaaggaaatgaatatttattgaaccccaatatgtgccagaccctggatttaacacttttagggataggagattatttaacctcaataacctctccctgagggcaggaagtggatttatagatgcggaaacagaggttctgcaaagtcaattgactttgcctggtaagaggcaaaaccagcatcctttatttaggcaatccaagtgatgttcatgtcctctggaacttaaatttttaaaacaaaaatttaaacagaaacatattacaaaagaacaactttatgcatgtgaccttttgggttctttaggaagccagttagtcatctttattttaataactagaaggtgaaatctttcctacaacatgtaattttaagttctctcatagttaaaaaataaatgaaacaactttttttttctgtctcccttttgactcctagagtctgtttaaatagcctttgaaaaataagtactaatcactggttcctaccaagaccagacacctgattcagaagctcttacaggggtcagagtgtgcgttggaaaaacaaacccacagtgccttcctggttccagagaaatgatctcactgtcaaattgtaacctgcctaataccttaataaaaaggtggggaaagtctgcggttttacctctggtatgatccttttcccttcactctttttattttaggcatgaccttagtgttttttttcttctagagtccagaggtggaatgacatgtcactcaggtttacaagatgaggatgtatctgtttttatattcagctgtacattttattctacttaaaaacaaacccaccttcagcaaccagggcgtatcaagggagagttatttccatccccctcagtttaatttggatacatttggcccagaacagcacagtgtttccataataacatttgaacaggatgcccttgtgttatttgcagggctaagggagtttcagcatgggccaggaaactactttcttaaaagaaacttaaacgcgaaattctgacaagataggaaactcttactgcatccttactaaacctctttttcccccctactttctcatttatttatatatctcttgtgttatgaaacatatataggttgaatatttaactcactctgaattcatgtgcagaataagtcactcttcagaaggacaaaaataatgttttaagtggtttgtttaataaagcacatattaaaaaatttcaattcaacatcttccctgggcacaacatgttatgactttttagagtagagcttcgtggtatttcataaggaagccaaaaaggaagggaaattattattcgggcagagggacaatagtgacctttcattaagcaagacagagttcaccatcaggctccccaaaccccaggctctgtgttagttgaactgaacaagccaccaactatttcctctctctctttctctctttctctctcttttttttttttttgagaaggagttttgctcttgttgcccaggctggagtgcagtggtgcagtcccggctcactgcaacctcagcctcccgagtagctgggattacaggcgcctgccagcacgcctagctcatttttttgtattttttttagtagagactggttttcatcatgttggccaggctggtctcgaactcctgacctcagatgatccacctgcctcggcctccctcccaaagtgctgggattacaggcgtgagccaccacacctggcctcctctcttttatagaccagactactttaaaaatattcgtccaatattacctaaaatatttcatttataagacataacccaacattgtaatatttaaaagactgcattatgtagtttttacatatccttaagatcctaatgaattcagataatcagtatttttgttcttttaacagctttacatgtgacctcttagttctagagtttgatctcaggagaagggaagagtagatttggattctgtgccgtggacaggcgcactggtttcccgtgtgaaaaggacaaagccccgccccttctggagctcagttctctttgggattattcataatgttctccaagaagctcggagtgcctgtttgtcgccagtactgtaatttgtgagtaaaagatctttatgattgcaaaatacattagcgccttcggagatcattgtttcttgatgacggtgtgaatcacaactaggaactaggaagtcatttcagccccttctgtgcagagggatgtcatgaagtacatatgctaaagttcatacccattgctcataagagctcagccaaccttctcaaccagttcatgtaaaaatatatctgtataaatatgcatacgtatgtatgtatgtggtgtgtgtgtgagttaagatatacataaaatttacgttttccaccaattttaaatgtatagttcagtggctttcagcacatttactttgttacataaaccattattatgtaagccattactgacatctgtttccagaacttgttcatcattccaaatggaaactctacccattaaactataactccctgtttctttttctccccagtcctaggtagccactattctattttctgtctctataaatttgactcttcgaggaagaatttgattcttcccataagtggaatcagacaatatttgtccttttgtgtctagcttgttttatctaacatattttcagagttcacccatgtcatggcatgcatcagaatttcattcctttttaaggctgaataatattccataccatttgcttttttaaaagtccattttctcaaaaaattggttgtcatttccactccccacccagccaatagaaacagcaaatatattaaattagaattgacctgacagaggaggtaatggaggcctgtaaattattcaaagaattattttagagtctgacagcaaggaagaagacaaaaatgctcttaaaaccagctcaggagtctctgaggctcttctgcgtggggcaggcagtcacaaagatctctacggctcctggagttctcgctggatcgtagcacaggacaatcttagtgattcctaatgatgccactgagtcatcaagacagagttattttctgtaggaagagtcaaagagttcagggaaagtgagtagtaagttacagaaatatctccattccaaatggttaaaattttttaaaagtttaggcttcagtcatctgaaaaatttacttgtgtgaaatgattcagtccagactgtagtgaaagagaggaatcccagcaatatcaaagtaaaatacacacacacacacacacacacacacagagagagagagagaaggagcacaagatctctttcttttttgtttttttctctttttttttgaacaaactcttacatatccttcaagcccaggccaaatggcaccttctctgtgaatgtgtgtgtgttaaataggcagagagaccttcaggggcgtttgctgacttctttcattctttttcatctcctacctccctttctagagtagagaattagtaggaacttgactcaagtggacggggatgtaatttctagggggagtttttgctgtcttactgcatctaaattattctgtctgtgcataaattaagttgtacacatatttagaagagccacctcccccactgcaggatgcatagagtggtttttgtgaggagctgctttgcagcctcaactctgcctcctgacttcattttgaaaccactgtacaataaaacgtggtcatttgtttgttccacattctttgtgcctactgggtttctggacatgatctctggccttgggggggacagtctcctggggaaacagacacacaaacagatctattacagtccagtgagttttttcctgggaaagttaaggatggtttcacagagaaggtgccgtttggcctgggcttgaaggatacataagagtttgttcaaaaaaaaaaagaaaaagaaaaaaaaaaagcaagagatcttgctctctggagaatgtgaaagggtaccatatgcaaataagcagagtaattgaagggcctgccaagcttgggaatggcaaaaaggccagagtgaccagaagagaggcagttggggatggaatggaaggggatgaagcgggaagatagtggaggctcgctctccaaggctctatgtgccccactaaggagtttgattagacctttcctgcagtggaatgccagtaaaaggtttctagcaggatactaagtgacatggctggatttttttgttgatgaaaatactgctggtagcagtgtgttggtggcactgagggcagcaaggaggccagatgggaaggtggggtcaggtgcccaagtgaaggtgctgggcagctgccccaaggcatgggcagtaggaactcccaggatgggactacctgaaaaggtgttctaaggtagaatcaacaagattgtgcacagttgatcatcgctgaacactcagtgcttagcgcaaggcaagcacataatagatgctcagtaatattgactaaatgaatgaatgcacaggcagctgggtacacatgacaagcagtacaagcaagtgttaaagtgacaccccagctatactcacaacagtgataaagcagaggttcacatggcctgtactttgcccaactctttctaaacgttctatcactattcgtgtatttctttcttacaacagtactgggaggtggtggtgtttttatccttgtcttgcagatgagaacactgaggcttgcagagggggacccattacagctgtttgggtggctgggctggaatttgaacccaggcggttttggagtacttggagcccttaattctgttgctctgctgccgcccagcttttgagccttccaggaagctgctgctttcaaggccccagaagtgatgactcggggcaaacctaagtggtggcaggatgcagagaagcctgtttaggaaaccatttatctcacgtagacatgccatctgagatgaccttagtagaaataacaatggcaatgataacagctccgcagccttttccctggcataagaaactagttttgtaatgaaaatggaatttctctggggaatagtcctagaaagagataggtagttgagataaaaataacaaaatataaaatagcattgcattgttttctgtgtatttttccttccacctttgtccttctctgttgtgtaatttaccttgttcccttggccatgggtaggttgggcatcactgtgatttgacttttgtcctttgtcccaaagaaagggatgagtgtgtgcatttagaggtagctatttgcaccttgcctggagcttgccatcaacatagctagctaaaaggaggagaggcccttgagggtaaaccttgctttaggagtcgaagcccttggctttctggaatgaagggtggtgagtttggtttcccagatggcccatgggccagaatctgagctccttggcattcaggtgtgtgtgccgttctggatcattacaaccacgactgagctgtgttttcaagccataggtcagagtcgtgtaaaataaactcttgtcataacaaaggatgcggcagccagattgcagctcggagttccttcactcatttaccccagaggacactgattttcatgtcagcatagggaagagattccatttgtctgccgattctaattgggggtctgtcttgctcgaccaccctggtaaatggtgataaatactggtggccatagcagcacagagagagagtgccggcctggaaacccagccaagctctcttggctccaattttatgcaaatttgcctaatagaatgcaaatgatttcacaggaatacggatcccagggacacgtgctcatctgttttcagcagtgttcctgggcttttagaagcagccacttgagaggccaggcaagtccacagagaggcaggttaaaggtggcttgcgaaggaatggctcaccccatcagccgatgccacgcctggaatttcattatgagcagcggctttccctttggcagtctgcgagccaagacttctgtgttttgggaacaggaaaaggtcaacacagactaatgctttttcaaaaagtcctttattcttcctcttattctacagattttctgcgatcacagtatatatccaaacatttactcatcctacacatcttgattgggcatttagtcactaaaaggcactgtgctaggcactgagaaaaggctgctctgtgccaccaaggtgtgacaccataacattgtgtctaaaatctactcctgccctctccagtgccgtggctgtggctaccaggctcacgtaatgtggccaatctgaattgagatgcgattggagtgtaaaatacacaccaggtttactggatttcaaagatgtagtatgaataaatgaatgcaaaatattttatcaataatttttataagaattttgtgttgaagtgatagtattttggatgtattagtttaataaaatatactaaacgtgaccactaaaaatttaaaattacatatgtggttcccattatatttctttctttcttttttttttgagacagagtttcgctgtgtcgcccaggctggagtgcagtggcgtgatcttggctcactgcaacctccgcctccagggttcatgccattctcctgcctcagcctcccaagcagctgggactacaggcgcccgccaccatccccagctaaattttttgtatttttagtagagacagggtttcaccgtgttaaccaagatggtctcaatctcctgaactcgtggtccgcccgcctcggcctcccaaagtgctgggattacaggcgtgagccaccgtgcggggccggttcccattatatttctattggacagcactggtctagactgctaaccatttattgcacaatgtggtcacctttttattcccatagttggatattactatataggaggatagaaagacctttccttttttcttcaatgagctacagttgtgtagccctttttaaagttcattcatattcatgttcttgtggctcccattgtcagtctgctgagctgggcagggaaggcctcaccatacttttacaggtgagcatactgaagtgtaagaggtcactgttgccagcctgccctaagagttaagccaagaataaaacttcagtagtttctgggtggacgtggtggctcatgcctgtaatccccgcactgtgggagaccgaggctggaggatcacttgagcccaggtgttcaagactagcttgagcaacttagcaaaaccctgcctctacaaaacacaaaacaattaagccaatcatggtggcgtgtgcctgtagtttcagctgcttgggaggctgagatgggaggatcccttgaggctgagatgggaggttgaggctgcagtgagccatgattgtgccactccactccagcctggatgacagagtgagaccttgtctcaaaaaaaaggacttcagtagtttctaactcttgccaggctggaccattacagctgggttgggaaggttggaaatagaactttcgacttctattctagtgtctattaaaaatacactaaaatttatgcatggaaatatttacttttatttctgtaccaaagatgatagaacacagcccacttagaagtatttctgtgtgcatgtgtatgtaaatacacacaaacatgctctgcagctggctaataaaacacagtaatcaaagcctatagtggatattcagtgtaaaggtaagacttgctgaattttgaggcccattggggaagggcagggtcagggtgagacaagcatgtggtcacaaccagggggcgttttcttctgttgggagtcaactactgttagggaaaattcctggcagcgtggagcaaggttggtggatcccacctgtcagaaaatcctgagactgggtttagtccttgagggatggaaggacaaggcaggtaccctggaccaaagaggcaagggatccaacccaggtagtcacccagcattggggatggcttaggaaaaaggttggggaggtgcagttctaaggaagaagagagaattgatcaagaagaggaggtggatatgggtgagagctgtgtagttgttgaggacatttagggcaacgggccttgggttgtattcttctgacccgccaggcacttgctgtttgggcatgtcatatactcttctgagctttcatttcttcatctgcaaatggggaagttgagttacagggtccctcactaacattttgtgattctatgagtttcgaaggccagagaatcagcaagaattgtattaataagctatcaatgatggtataaaggttttgcttctcactgctgctctttctgctgtctgatgtgctgggggcactgaggtctatggcaaatgagatcattggcctggaccattcacttggcccttgacagacacaagttgggtctaggatttctttgcaactatagccaatacatacatattgtagtataatatctaaaaacatttatacctacttgtctttcttggttctctctgttctccttgtccctacactttctatgaattataataataataataattattactattattatctttttttgagatggagtctcgctctgtctcccaggctggaatgcagtggcacaatctcggctcactgcaacctctgcctcccaggttcaagcagttctctgccccagcctcctgagtagctgggactataggcactcgccaccatgcctggctaatttttttttttttttttggtattttcagtagagatgggggtttcaccgtcttggccaggctggtcttgacctcgtgatccacccaccttggcctcccaaagttctgggattacaggtgtaagccaccgaactcagccaaattataattatttcttatctcctatcttcagagtctagtgttacacagatagtaattctccaacattgctcatatgatttagtaaatcactgcatgttctcggtttagaaggattttccctgtcttataccttctatgaattaaaaagcttttggaccatggatgaatgacataagaatttaactacttttttttttcttttcttttgaggcggattctcactctgtcgcccaggctggagtgcagtggtgtgatcttggctcactgcaacctcagcctcccgggttcaagtgattctcctgcctcagcctcctgagtagctggaactacaggtgtgtgccaccacacccagctaattttttgtatttttagtagagacagggtttcaccatgttggtcaggctagtcttgaattcctgaccgcaaatgatctaccggcctcggcctcccaaagtgcagggattacaggtgtgagccaccctgcccagcctactttttctttttaaagaatttattttaattgggtttcgtaaatgcagggatacaaaagctattggatcttgagatagctttgtattttgtagagaatcatcccaggagcacattccctcactgagggttccagccacctcttccgcctcattatactttgcttagcaccgagaagtctggcatcgtttctgttggaatgaaaagattggcagagctgccctggacaacagcactgcaaaacactgtggcagaaggtttggtctacataccaaggcagccaaagtattaattgcattctctgtgatcacaaaataaggcgctgaattattctcttcatgttttaagaatgacaggcttttgctctgccagctccaagcatagtgcatcacatggaaaggagatgctagatttgcaaaaaaaaaaagagaaaaaaagcacaggagtgaagatctctggtagccagctgcttcctaaaaaagatttaaagctgaactgttgcatgagaggtacctataaaagatcaggagccgggtgaggaagtgtttccataaatttacatactctgttaaaacatgttctattttggaatcttactttagattttgaaatgggacttttcacgttgctggctatactttgatcccattttcctttgttttggtgtatttactggagaaaactggttatgatatttctatatgtacttgtctccccccagccccagaacaagcaccatatgtgagtattccagatatccaaggtcctctggacaccccagtctcttccacaaagctgcctcctcagagcctgctgtcccgtcttctaggaatgtacccatttgaaaacccacactcacactaccacaacacatacactgtttcttgctggtcgttcctttaatctcagtggaagatatctcatagagaactgttggtgattgcttaacttggttgggaggaaaatagatcaagcaggtgacaacctgcatattggggattttcctatgctgaaaattgttattctgttgcagcactccaccctcccttcacagccccaaaaaagagaagtacgagtgctgctgatgttcagggtttgaatatgttttggtttaagatgttcagtggaattagagagaatttcatcctgggcagtgcagtcaggctggaggagtattttggtttcatattactaaaccttgttttcccatcccagctgcttgtgtgctatcttggggccactgagaacctggctgggctctgcggggtgggagtgttgtcccggggctgagtccagccaggggtgaggtcgtcttggtgcacatcttgcacgttgcatgaagctcagagcccagcttggctcttgtgaacttcccctgtggggacacaccctccaaccaaagtgagggtccagcggccaccaggttgtgacatgagagccgtcgctattattactcatcacctgcagcagcaggaagggtgcccagaccacagaaatcttctgtctctgggcccgtgcctactgcagttggcagagagctcctgagctccttccctaatgcgtggtgggagagcgctttcttcagcactttcttcacagggtttcctgcagtgggagtcttcctgatgctctttacccccatacttatttcactcccagaatcaaggagaactgttaagccattcctcagtacgatgtgtcatggctgaagaaccattcattcaagacattggtgaagagggttctttcattgcctttcttcaacgacggtttatttgctgtccatttgctgagcacctgggtggtgccaacatgaacccatttccttctgtgcgcaagccccccctttctattaccagagtgcagatcccagctagcatggtacgtgtgagtgcgctgtataaagtctggaaccacaattagaaaggaaagcctttctaaaggtattttgtcttgatattcattaacctattagattgccattctttcatatctaagatgatcataacatgtctcatccaagctgagacacttgttattaatcattattctgggacaatagggtaggccaggatggtcccaggcaagctgatgtctagagtaataaccctgcacatatgaatcttttgaaggattgggcatgatttttttttttttttttttttgcactggggttggctggggctaggagtttgtgatgaatccttccagtatttttctgaaaaccagtgaactattttgtaggtttctgtgtcgttagaaacatgcaaacctatccactaaaaccactccagttgatctattaagtcattcgttaggtcttacctggactctcttcactgtcactatcatgatctgtccacatcactggccctttctcctatcacctagctctcctgtgagcccagcactgatataaagtggtttctagtcttcttggactctcaatttaacttgcttcccatgggaatcttctaactgtttccccaaaccaccttgtagacattcatttctttgtttaggattctaagaataggaaagagagacataagctagattccattcctgtttcagtaagattatctttccaacacaagaaaggaatacatctaaaaaattctttcagcattttttcccgctttattgagaaaaaaaaaaaaagaaatactcatgagtactccagggcctcggttgatagtgtgacaaaaatagttccaactaaactaagtaactcaaggctatttgctttatctttgtactctttcatgtgttcccgagtcttttacagattgggatggtacactttggtttaaattgcaaactcttgtatttaacttcctctgaatgattcaggacggggctgtggacctgttgacacttgatgagtattggtttctagtgcaaatgatgacctgttgaagggcatcaggcatatctgaaggtagctgtccaactaggtcacgttcccatcaacactgtattgtgaatctttggtaagaagagtgataactttttgcaaaatgtagtttttaaaaataaccgtgaacttcagtgtccccagtcaaaataataattcatttggggaacaatttagagattctttcgacaaatacagagaaatggaagccaatcatatgcgcctcaagcatttgatattggaagaaaatcagcatctactaagtaactcttgtgaaaaccttatccattttttgcttttttgcacttttcaatctgcagcataaattaggccacaggaaaaggatggcgtaccttcaaagagccagttgggttggctgtgttctttctattcgtggaaaacagctgtgggtgccgggtgttgaagtcaggcttttgttccatgctaaggtaggaaggtttgttcttgagacctatcactcttctgtggaggaggagttcacagatggtgagccgctttatcaccatctcggaggcttttgaaatatgttgataatgacctgggaaagagggccgagtgggatgagggtgggagtaggaaagaaacattcggcccacacagtgttcatatcttctcttgtttttgtatctgtggcaactgcagattaaatgaattaggttattcttttccattgccttctaccaaatagaagtacttatttaagccttgcagatttttttcctgctgagtgaagcctgaactgagcccatgaaaggtgatctctccaaagcaagggctcctgtttccttccttccatcctgctatctcattcaagtgaaattcctgccatggcatttatcctgagctttgtcacacaggattactgtgatggtccttactatgaatggagtgttaaggtgttttctttagctcgagataaaaaccagttttaggaatgaattctcttttgctgtgaaaaacatgttctaagggaacaaacctcgcctcatttccatttttacattgagcaaatggttgggaagttcctttaatactgtctgtcttgactcattgtctcactttttttttcctgattctcttgtgcgggacctttttcatccccacagcttccgtatcgtctgtatgcagctgattctcaaatgggtatttctgcaaattccagttctgcttatatactatttcctgatgaccctttctatctggacttcctgttggcagttcaaattaaacacataatcaaaatatttaatccaagactaaactcatcgtcatccctccaaaaccttccttggactcaacagtttctcttcctgctctcatcactattccgatcacccaggctcaaaacctagggtgcattcttccagcttctgctcaggtttttgagcccagcatccttcactgccctccattcctccctcactggtcttgctgccaccaccttcttaactcttccctaggggaattcattcacctgctccagtttctccgcactccagtttatcttatactttgtgatgatttaattaaaattcttccctgattgtttttcttcttgaggtggagtctcgctctgtcacccagctggagtacagtgggaccatcttggctcactgcaacctccgcctcccaggctcaagtgattctcctgcctcagcctttcaagtagctaggattacaggcatgcaccaccatgcctggctaatttttgtatttttagtagaggcggggtttcaccatgttggccaggctggtcttgaactcctgacctcaagtgatccacctgccttggcctcctcgagggctggggttataggcatgagccacccttttttttattttaaggctcctcttttcctaggtaagtcttcattttcctttatccagctgttcaaattcctctctccatctttcactgcaacctatgtgacattttcttcatcattccctgctactccttagcaagattgctatgctctgaacccgccctgccttctctgttctggggatctttttcctgctgtttttacatcccagagtattctgttcccatcagaattctccatcccttaaggcccagatctgatctcaccttcaggatgacagtatccctgttgggagtgaccccgctgatttctaaatctttaccaccttttcagcctttttctttttttttgtgccatttttccaggccttgtcacatgctctttgatattactttgatatacaaatgtttgctatacttttccttcttcctcttccaggttataaacatgttgaggcccggggctgttttctaagttgttattttaggcttgtgtatatccaccaccatgccttaaaaaaaggcctcacattagtaagagctcagtaacatttgctgaatggatgaatgaagtatggtggctttgctatctcttactttacttgttcacttctctcctagcttcattcattcattcattcaacaattacatattgagagcctattatgtgccaggcactgtgctacgcatgtaggtttatcagcaagcaaaacaagatccctgcctaaatgtgccagcattctagattcttccttagactcaccatctttgcattcactttactcagctcttaaagaaacagtagacagttattgtaaatactattagctttatatttatgttgttcttctgtgattaaactttgctgccaagaacattatgctttcttggtagtttgcaacttgagtttctgattcttaaaattggttgcatatcccaatggctgtgatggtgttgaaaactctacttcttttctccccttgactgctgaaccaaatcattttccaagttgctctgaaatatggacaaaagactccttgatttcagccctatgtgcagcatggaaactttcactaggctgtgcctactgactaatagcaagtcaatgcccatcttcccttggttgcttgctaaatattctaaaacgaaaacaaaacagcagtgaattatagcctagcatcagtaagaatggaaaacaactgcttttcaaagcttgatttgtattgtttttaataaggaaggaaaagctttgttatataaacacatgaaaatatggtagtgttcgtggcaagtatgttaatggataatgtgcctaaaatctttgctgggtcagtgtcattccctctttgtgatgctgaaggaaagtcacaaaacaaaaacaactcagaagaagctaatgtgtcatcttcatgtagggatctgtattcaaagttctttttcattgtagctgtaatgaaacagtatttgtggaaagatattgcactcaatgccaaaacccaacaattttgttttcaaattcctaaaaactaaaaaaagaaatcttggtgacataaatgttccaaaatcaaaatgtccaaaatgaactcatcaacttcctcctctcgcctgctcatctatgtctgttctgtctgcttaatgatatcactgtccacccagacagagccccaaactcttaaatcattttcaacttggttttctcatctgtgagatagagctttcctggatcatctcttaagattctttccagccctgaaagtctgcatatctgagttcttcactcatactccccacatatctgaatcctgcttctaaaagtctctcttccctagatctctggtttttaggtttttaaaattattttattatttttttatcctgctgctgctgctgctctaattcaacctctcattccttcttgcatatgctgtaacctcctagccagtcttcctgtcatttcaaaaattattcttaagtttacctacagtaaaattcatcatttttgtgtagctttgtgggttttgataaatgaacagagaggtaaccactactctaatcagtatacagaacaggtcagtcaccccccaaacatatttcatgatgagagtttgtactcaaactgcccgccaccccctaacccttagccctggcaacttctcttctcttctatatccctagagttttgtattttccaaaatgtcatagattggtatccttctctttcagcacctgttcccagcccatccatcctcttcgtcaatgccatttatcttcctaaaacatctctgttgagcaccttgagaaacacttagtttctccaagcttcagtttccttgttagaatgtgacccagccagagtataaaataaggagcatacagaattctaatactttctaaggaggttggttcctgaggaggacccttcatcttgctaactggggcaactgatgggcagatcagagaagcaggaagtcactctgagtaagaaatggtggcctagagctcttgtgagaaaagggatccaagaagggggtagtagagagagaagtgagagacggagaaaagagaacaactgccacaagaagcaaaacgctggagagggacagatgtctacagaagatgttttgggacagttttgctgttgaatgagtgccagtatccttccatagtggcctcgggagacctgtagttcagacccgtgttgtaggaggtgtcttttgaatgggtcttattttgaggagggacccaggagacccagatctgcaatggggataatgacatctgctccatgcaatcatcatgtggggatcatggggtagcaagataggaccctgcctggcagagattgggcaccaaggactcccttcccaccatcctgtgccatctctgccttctctccttacttcttgcctctcacctggaaactgccgcaaaccaaatcctcctacctccccttcaatgaccttcagaatgccagccctgaaggttggctcagaggtcattgtataccaagctacagagtttggtgtacagctgaccttcagggctggcaccagcccactttccagtctacctcccattaaagttctctgtcctccttactttctgctcccaatcctcgcccctactcctgccctaatcttacgtcccagctacgttcaactcctttgttgaaccctcctgcctccccttcaatgaaaattaacctatcctttgtctacattcatttcatgtttattcattttgtgtctacatccattttctgtgtatatatacaataggttttgtatcataattattcatgtctgtttggacacccctgcccccaactgtgtaaaaggtgctcaattcatatttggttaaatgaaatgaattcctaaataatcacagcaagtttgaacctagtgaaggaagtgttaaggcatttcttttacattatgctctcattttaatgtacaagtagcatgccagctatggggcaggttttactcttccagatttcttgtggttgtcaatgcatcaggcagcctgtttccaaacagctgccatatggccaaagctcctcaagtgacccttttatgtgtataagagcaggacatagttcagatatacccaggagaagtaagggcattgaaaacctcccaggctgctgttgcagaaaggacagggagaatgccactacctggaggtgggaaactggacgttgctatacctgcccctccatcaccatcacatagtttgtgtgctgtcaaatttaagttgccaacacaagccatggaccacaaagacatgcttgctaaatcaagttgagtgagatgcacttctagtactttccaaacccatgctgagatgcagaacccccagccccatgcagacagatttgccctgcatggaaacggtgcaccctctcccgctacacactcagagatgagagatgagcctgtttgtgaaaccaaactcaggattctgtttttgtgtaagaaccgtaccacatggctgacatatgttcagtccatggctggcagaagcctcctgaacacatcccccatccagtacctccccggcagtgacccatctcatatttgcatatgttcccctgtcacaagattgtggggagggtgcagtttgcagctgactccttacctagctacagctccaactaagggcgtgcattcttggggagatgttgggagcatcacaaggtccccttccgttcccagaactcagtttcagaggtcagccagaaagagaattccagaggtcagccagagagagaaggtagcaaggacagagcccctactgacatttttcttcccacccatcccatctccagggcaatggtcttcagcagggaacaacgggccctcattccctgccaggggagctgagtacacacaaactgctggatgggcgagaagttcccccagtgatctttatttttccgtttagaaagaatccttattccagccccttctctccagctgctgcgtgtgagcctgtctctgtctcttgggtggtgcagctgcaggtgagccagctgtgggcggccctgaaggacagcgaggtagggagcctggttgtgaggtctctgctccctggggatgctctgcagccttttgcctgcagcaagtctgaaaccttccatgcctgactccccctttccatttttttcctggcgtctgcccttgctggagtggagcatggtgggagccagcccctggagccttccaggattctcacagtctgtagccagagctgtgtaggcctgacctgggcccagcgggaggaggattttgaataaaaaccagtggttcctctccgtccaaaccccccacccctggaatacattgcaaccaaatatttactcaaggttcccccttgccatttaaaaataagatgcttcacctactagcctggcggtgttctctgctctgaaattttatgctcttgagtcatacatttgaaggtagctttttttggatttaaaatttcaaactaatgaagttgtttaaagtaccctgtcgagtgctgggagctgcttaagcattgccacataagcactgcagaggctgggtctggcgcatacatgccaggcaaagtctgccttgtttcaaataaccccaggaagagtctctctacctttggtgcaattcagatcttaggaataggacttctggggtcccctgtttggggactgtgcttagcacacacacttgggtccttgcatgaaagcctgcaaaagtatacgtgacttcctctcttttctcctcaaccactgcacccctattttggggtattcttagacttcttagtggggaggcagaggtggttgatgatgcgctcccagtcagtcctgtctaccttcttctacctcaaagggcttccattaacatcatccaggaagtgttataaatcctgccacccaggccacatctcagaccaatttaataaaaatatctgggctggagaggggaacccaggaattagtattttttaaagctcctcagaagtgcccccaggccaaggctgccagcaccatatccattcgtcagcgcgctcagggacacactggtaccctgtgtgctgacctgctgcagttagagtgacaaaagccggattttgattgtccagaaaagtaagggttctttgctgtcgctgtggagtctccagtcagattttccattggaataggaaacaaacgccaagtttattttaaaagtgctcttgatctacctaaaactaggaagcaggaagaatcctcggggagcagttgagtctcacatttgaatgtgtctttgcttcctctgaaccaaacttcatggtttcatccattaccaaagaggccctggtgacttaggagggatagaattgaactgaaaattccgggatcgctggaaaagtgatttaaccagtttttcaccacatagggaaagttatttggtgagataacagacctcgaggccctgcactcttctgcgtgtggttctgggttgggatacggttcccatgagcagaagatcattcctggctgattttgttcagtgattatttgtttaaaactttaaaaagaagaagcgcagatacagtacatttgtactcagctagccacgcaaacatctttaggctaagaataataaacaactaaattagtggtttgttttattaccaaactggtagagtttcacaggcaggaaaagacggtacctcccaggctggagaaggttaagtatttttgtcaaggaagattaaaaaccctaaaagcttttggttgaattttactgaaatcagaacgtgaatccatttgagagctagcaaccaaagacccgtagaggtgacatggaatgtttttaattctgagagatgggcgtttcagaactcggaaaatgacatttgttttgacatttggtatttttgttgccatacttactgcctttagttcttagtggaagtagtttgctgctcctaattacccaaaaggcaagaaaaaaataactagaaatttttcaaaagaggggaaataggtcttgaaagtttcattaattgcaaaatgaaattaaatggagcattcaatagaagtacttctcagaaccaatggagaatttctcagaaagaagcccattaaagctggattctctaaagcagtggaaatcccaggaacaaaagccaaatgcctgggaattgagtttcagaagaatttttgaattggtacagatcagtaatttacaaaatggaatggaatcactgaatgttctaaaatctgttcagctaaaatgggataataaatttagcttacatggaccctgcacattcaacttgtgctattatgatatatatatctatatatatttactgctatttattaagcattttctgtgaaccagggcctatattttgacatacatgatcttactttgtctaattacaaagattcagtgcctttcacagaagtcattagtagattttgggagggtcgtgttgatgactttttggtgttttgagtaagtaaaatgtgtaatggcatttgagatattgaatgcttgttaaagctgaccttgaaaataagattttcattccattgccgtgctttacaaatcaaactgccatttaggagggaaaaaagacaaataaatgaagtcaactttctttatttcttaaaccatgggttaaactgggtatttggacagatcgttttcaaggccactataggatacttcaggcaagtattttgaaacttgaaagcatttctgataaacttccagggaaaattctgatcttttggtccatgagagaaataactgctagttacaactctggattggaatcgcagtttgaagataatcagaactgcagcttaaacatcatcaaagagtgacctgtagcttagctttcttaattacatgtgtcaagaacttgtgataacagacctaattgaaatgacttattgagtcaggtaacatttatgcccttttaattaactataatttttaatttacctgatcagcattaagctcactttagccgacaaaaggctatgggctacagtcaaattgcaaatagaatacttagtaaatgtgatagtattagctcctactatggactaatattagtttggtcttgaccagaagaaatccttgtgcgtatttatgttgaaagatgaaataacttactgaaattgttaatgaagtattggataagctactttaaaaataacaaacccgactaccagcaacaacacaaataaacaaaccgtcagcctaaggtggacatgttggcttctctctgttcttaacatgttaaaattaaaattaacttctctggtgtgtggagatgtcttacaataacagttgctactatttcttttctttttctctttctttcctctctctttttctttctttctttctttctttctttctttctttctttctttctttctttctttctttctttctttctttctgagacaaggtctcaatttgtcactcagagtgaagtgcagtggcatgaacatggctcactgcagccttaaccttctgggctcaagaactcctcctgcctcagccctgcaagtagctgagactacaggcacgtgccaccatgcccaactaatttttgtatttttttgtagagacaggggtctcactgtgttacccaggctggtctcaaactcctgagctcaattgatccacctgtctcagcctcccaaagtgctgggattacaggtgtgagccatcacgcttggcctattgttagtattttttaataatttttttaaattgtggtaaaatgtatgtaacataaaatttatcatgttaaccgtttttcagtgtacagcttagtggcatgaagtttcttcacaatgtcatgcatccatcaccaccatttatcaccagattatttttttcttctcagacagaaactcaggatctgttcaacagtaatgcctgttcccccacgcctgcagccttggcaaccaccatactactgcctgcctctatgaacttgactactctaggtacctcgcataagtggactcacacttgtgactggcttgttacactaagcatgatgtcttcaaggttcatccatgttttggcctgtgtcacagcttccttcattttgaaggctgaatgatattccattgaatggatctactacatattgtttctccgttcatttattgatggatacttgagctgcttccccttttggactaatgtgaataatgctgctatgaacggtatgtacacatatctgtttgagtgcctgctttcaattcttttgaaattccacttccagaagtggcatttctggatcctattgtaattctatttttaattttttgaggaaccatcatactgttttccatagaagctgcaccattttacatttctaccagcagtgtacaagggttccagctgctctaattcctgaccgatatttcttattttctggtttttcaagatggccctcttcatgagtgtgaagtggttaacttattgtggttttgatttggatcttcctagtgattaatgatgttgagcatctttcttatgtgcggattggccattcatttatcttgtttttagagaaatgtctgttcaagttctttgttgattttttaaaatcaggttgttttgttgttattgagttgtaggcgttctttacatattctggacgttaatccgttatcagatatacaatttgcaatgctaccatttcttgaggcttacagtatgccagatgttctactaggtgctttatatataggatcttaattcattttacaaccctgagaaatagatattatcaccttcatttaatagatacggaaactgaggctttgaaagtttaaataactcattcaaggtcatacaattagtcagtggcaggggtaggattggatcacaggtatgtctcactccaaagcctatgatctcatgcagtttggcatggatactcttctatctttttgatttatgattttccttcatttaaaaaatcttttatttagaagtataataaatataccaaaatgtaaataaaatataaatgtatatcccattgggctattttaaagtaaacactttgtagccatcatgcaggtaaaagaaacagggcattgccagcccccataaggccatgtcccctgacaatcatagccctgtatcttccaccaaaggtagaaattatgttaagttttatggtagccaattccttactttccttacacatttaccacctaagtatgtcaccctaaatgatataaattagttgtgcttgttatttaacttcatgtagatgaaattgtagtgtatgtagtttgtgttttgggcttcatttgctcatagttacgtttgtgagatttcatgaagctaaagtttgttcattttccttgttgtattttattgtgaaagttcacccactgtatttattcatcctgttgtttttgttatgatatataatgctgctgtgaacattattgtacctgttctttggtgccttgtgcatatatttctattgggaacacaccaaatagtgaaattgttgtagatgtaatgccatgtatgagagttcctgttgttttgtatactctccaaacttagaactgtcagtctctttaattttagccattctggcatgttcacaggagtatcacattgtgggtttaatttgcatttccctgattacttattactaataatcttttcatatgcttattttcttttagaacgtgcctatgcaagtctcttgtccatttttcaactgttttctatttcttatgaatttgtaggagttctttgcagcttctggctatgcatccttcattaattttgtgtgttgcaaatatattcttccattttgtgacttgtctttttagtctcaaaacagaatcttttgatgaaaagaatttcttaattttgatgtaacctcatttatcactcttttccttcatggttggcacttgttgtgtcttgtttgacaatgttgcctatcccaaagtcatgaagattttctcttatgttaacttctaaaagttgtatcatttgtcttttatatttatatctacataatgcacctggaattgagttatatgaatgctgtgaatttgggaggggcgtgtttcctttttttcccacatggatatccaatcaactcagccacatttactgggggaagacatctttttttctaatgcgctgtagtgttaggtttttcaaaacttaggtgtctgtatatgtgtgggtctgtttatgagtctgtctattcttttccactggtctgtttcctacacttgtgccaatgccacactgtcttacttatagctctataagtcttggtattgttaaggaaaaatatttgtaacatttgttaaaaatggcagagaagactttattcaaggaggggaacattgtgataggtagagggactgctgcaacgaggtcttgctgtggtgaggagagagattgggctggagtccaacttctacaaggacaagaggggatttatagtcaagcagcagggtggggtcagtggatggaagaggaaacatcagagacaggggtattcttgctagaccaactcaacagaattcttgctgaaggcaggccagggtgataagatatcaagagttaggggtgaggacagataccaagggtggagaattttcactaaaactagtaggattcttgcttaaactggattctataagacagaaaaggaagcccaaggtcagggtctagtggaagagaaggctccggggagcccgacctgagtttgatctaggagagtctttgtcaatatcctgtagaatatgaccttcacctcattttcttttcctcaagtgtatctggactgtatttggccttttgggcttccaggtgacttttagagtaagtttatcaagatctacaaaaatagctactgagattttgatttgaatagtatttcttcctgataatttctgagtaaaattcattttaaggaagtaggaggggcagtggcctgatgaaaagcaaaaatgaagaaaagaataaggaaagacacagttttgccatcaccagccagtgtttagtgatcttaaaatagctgcttttgtttttgagcatcatttgttgggtatggagttgcagaagttgggttgagggacactggcttctagaatcaaatattggcctccatagagtgtttctgtacagtgagttgggaggatgggcaggggccactgaggactgtggcgtgtccccacgttagagtgtatctcacacagagcctgtcctgaaaatatagttatttttaaaaagtgtttccccctccttttcattggccattttctcttttactactctttacctagcaaagggtgggcatgagaaacctggtcagtggaagagaaagccattttgcaacagtggttataggggtgggagagtaaaatttcctggttcctggggaagctaagcccattggtaggaccagacttttgtatgtgtgtttcttcctttagtcatctactaaggttaataaataccttaaaaaaaaaaaaaaaaaaggacatgatctccctctgtcacccaggcaagtgatcctcctgcctcagcctcccaaggcactgggattacagtcatgagaccctgcactggctcattaacaattttttttttatatagagacagggtctcgccaggctggtctcaaatgcctaaccttgagtgattttccttccttggtctcccaaagcattgggattacagacatgagccgccacacccggccaagaagtgccttttatgtctcaggcactgttcttggtgctggggaacaagatagacaaaatcctcactctcatagagcttaattctagtactagagacagtcgagaaattattaaatagaagatgtaatgttgagctctgataaattctataggaagaaaaaggagagtcagggacagaggaagggaagtgacgaaggagccctgtggatctctgagagaagagtctcccagacagggggcaggtggagggtccaggacaaaggctgggcatgccaacaggggagaaagaggtattgcagtgggagggagggaaagtggcgggaaatgagatggaggaaagcagccctggccagacccaaaacctcacttcttatgatagatatttagtaacacccttttcactcttcaatgatgaaatttgtagaaaatataacctatctacccacatcattacaaaccatccatacaatgccttaactgtaatagaaaggaagtacaaaaggggagaaatgtatcatgaactaagaagtatttcatgactacactggaagacataatggtgtggtcatatgttttgcacccacttgtaggatcactgcaaacgtggcagctataaatccagatggctgcagatgtgttatattggccactcaaatgacataatcggtgttgactttagtgatgtgatatttctgaaatggtgaatacgtgttagtaaagttctaaacaaaacaaagtacatcattccctattgaaatccagcatttatgaaaatcatggaggaaacccttgtgttgacaggtaaaatggcgtaggcttttcagcccttccaggggagactggaaagtcctgggggacatagaatatttgtggcttgtgctagaccatcccatgtactgcaggttgtccagcctgtctggccccaccccttaaatgccactaatgactcccaattgtcctgtgactaccagaacagcccccatggatttccagatgctttttcaagcattttgggttttgtttgcatgtaatgagaagccagcagacagtttggatcagggaagtgaagtgacccaacctaggttttaaagagatctgccattcataaaaataatgaaggggaggctgaggtttctgtgtcacttagcaaggactcggcccccaagagtgagctgcagaggtaccaggctgacctctgtctgtctcaagcttagactcacccagaagtctgtctttctaccccagagccacctagaccatccatcagaggcctccctctaatgaggagtagggtgggggcaccccatggtgtcctttgtgccctaaaccctttacaataacaggtgttggctgtcacctgaagcaggtttcaaccatcactcccttcccaccatacacacactcccagctcattttgattccttttcctgcaataaataacagattcttgcaaagtggttagaagaaattagtaagttaagcctcacactagggttattttgccaggagaccttcctttcctaggtaaccccctccaccacgtgggcaccccagtgggatctgctgcagtctgcgccagggtttgcttggcctgcaagggttggccatggcagatgcctttcctgtaactggaatcccccatgcctggccttccagacagtagagagataattggataaaccctaaactggaaattacaaacaataactactctgttagtttacatatgaaactacttaagcaagtcctttttatttttatttttcgacaatatgaagctcattattcgtgacactcggggcactctcaaaatgtgctcaagaaaagggtcacggctgtgtagtatttagcaccagaatggaaacacccattccaagttctcttccatcctttggccactgagaggtttggtttagtggtcccggggaggacaggaaggggagagccactttaacttgctgttgttgagtgaaggtggggcaggagtgaaaggcattgttgttgctgagtgtgttttcatgaaatctaaccttatttaacatgatctccagtaactcactggtcttcaagttacataaaccttgatcgaaaattatttcccttttttttttttttgagacagggtctgactctgtcacccaggctggagtggtgcagtggcgtgactggctccctgcagcctcaagcaatcctcctgcctcagcctcccaaagtacagggattacagacatgagccactgcacctggccttgatttttttttatataaaaggatattagagcaaaagagtgaatatgtataccatagtggtcaaataaatacttctgcaggggccacacacaaaactgtgaaggcagaatctatttctgtccttagatgtgttggtcaataggtgtttgggcccgtgaatgtaggacccaaatgtaatagcagcactatactctacagcgtgtgcatagctggattcagaatttttggttttaaaaattaagcttttatttatatttacccatcaggtcaccgaatacttggattcaaccaaatgcttgaaagcttcttcatttgggggaaggtgggtttggaggcagaaatccctgcagactccacacccggggttttactaggtcctccgcggcaggtggaaggaaagcttgttgccctgcagttccgtttgcttcaaaaacaagggtgggaagggttcaccaattgatctttgtgcatatccagtgtaggaaaagtgttatttagagtatcattataaaatcggctgcatatggtggctcatgcctgtaatcccagcactttgggagtccaagatgggcagatcacttgaagtcaggagtttgagaccagcctggccaacatggtgaaaccctgtctctactaaaaatacaaaaattacccgggcatggtagcgggcacctgtaatccccactactcgggaggctgaggcacaggagaatcacttgaacccaagaggaggaggttgcagtgagccaagattgcaccactacattccagcctgggtgacagagcaagactccatctcaaaaaaaaaaaaaaaaaaaaaaagagtatctttataaaagcttgactcccatggtagatggacctaattaaggtttaccagcaagtcccagatattagcatagcataggaaattaccgtagaggcatgtaggagtcatccagatttggccaactcagaggatagagagaaaaaatatctctccctccttcctaatctcaagggagatggaaaacaagaagatttagagcttcaagaatgaggattgaggaagtacaatgtaaaaatggctccctgggtcccttcttggaaaaaaatgtccagagagtttccaaaagtggttttcccctcctttttgaggaatatgtgtttttattcctttgtgaagaatatcatcttagtagtcttatttcatttgtctatttccctctttaatattaatttgatctgagatgcttgtaaagaccaagcaacaaaaagatgtcatgccaccttcatttgccaccatcacctgtgaagttcagacaacgcagtatagacagagccttaagagggaggagtcaggcgtgaggctttgtgaggggtgggtggtcaggggtgtagccacagcctttgatcataaaccatgaccggttagaactgggaggaacctcaaagtcgctaggttcaactctctcatttcatagacacgaaaaatgaggtccaaagagttcaagagactgccaagggttgtacagctaatcggccgacctagcaatcgaaggacagatttgagtatttttttttaaagcataggcttttaagttctttatcattgtcagtttactttggtttgcctttaaccttcaccaccccagctggtaagtgtaaattgtcattgttaatgtgctttttccttgaactgcttgtgaaggactctctttcaaaggagccggtagaagggaggaaagttggtggcatattacatatctctacgctgagattcaatccagaacggccttgggagttcttcgtcggctgacacaaggcaaagccccagctctgatctgaaaagtttgtatgatgcattttccatgtgtattggttgattggttttgctggaagacctaaccaagagaaagcattccgaccctggcgttagccccactcatgagtctactttatactttctacattttgtctataaaatttgccacttaaaaactcttgtttcatagaaaatggacttgattatctgtatcattatgaaaatcctgctgcattatcaaatcttcctaaaaggttaaaaagcttttttttttttttcaatctctgtctttgctgtgattttagactgggttgtaaacaagctataatgtgaatggactaccaagagatctacaacagaagcagcctcagaaatagaaattgaatttataggcagtgagataggataattagcttttatatttaaaaatatcctcagaccagaggagtctgctgtctcagatagagaagggaattgagtttgaatcctaatgcctcaagtaatttagtagaaactgcctgttttatataaaatatatacggcagcctgctgtgtgtgtatttatgatctgtatctctatattcctctctaaacacatgagttaaagtgtcagtctaagtctgaacattcagattacacaaatcatttgtacttataattctcagccttaaatgttgttgttgatatagctaaagataacctgattggccaattatctcccttttttctttgagtggttatttggagttcaaaaatcaaacaaacaaaaaacatttctgttttttttacatggagagcaagaattgtctcggatgtttacccgaagttttttgttttttatccaaccattatgcactacagaatgtacaatttaaaatgctctatgtaggttaaacaataaaagacacgagaatattaagtgtctgctattgttaaatatgtgtaaattcaacatacctcctgtaatggccagtgtcttagccgctgatccctgtcactctgaattggcagaaaccagatcctggcttgggatcttgaacagatattttttccagggttgcatcacaactcttgggagggcatcctgtctgaaatatgctgtctccccagcctgggtcagcagggacagagagaaatagcatctgtcagctgggttgaagtctcccgcatatggagtcagtcactggttctttgctgagggttcagctaatgagacttgattgcttgtggcactcttgtttccaccaaaaagagcctaaaaacaggatgaacttgaaaacaagaggaagtggtgctatgcttccccatgactttagctccagtttgcctttgagcaagggggaagcagaaggaggaacttcttacgtacctgcacggtggttcataccaggggttcatcaaccctgggatcttgcccccttctctgcctcctgtcataaatctctgtttcaaaggaaagaaaggggatggttgttaaagcataaacctccaggtcagctcttgttacattagaccccaagatgatgtccaaaaccttttgttgaactgaaatgctagcttggtttgaaataactgagccattcattgcctagggatagaaaatctttctgttgtaaagaggtggttggttggttggtgtgtggctttgtttgcaaatacagaaagtgggatggggattggaatagtattggccttgtgggggctgaatattgaaagcagcaaaactggatgtacctaaaaactaaagttgaatcggcgagttcatccatccttttagagctattttcattgagatataatttctttcagttgcttgaagttttcagcatcagatcaagttttctttcttgctctccaatacctcttttgcttgtttgccatctgttcatttccactgcaaactgctctttacacaatgttactcggtgttaattagaacacgtgtctctttgtcattcatctggagaaggggttaatgatgatttatgtccctttaattggttttcctccaaactgttaggtttaatttattattttataagaattccaagagactgggaaagaggaagagtgcctaatttttattcttcatgtctttaactatatatctcttttgctttaaaaaagagcaatcttggcctaactattttggtgttttaaaagtatggttctttggccaggcgcagtggctcatgcttgtaatctcagcacttcggaaggccgaggtgggtggatcacttgaggccaggagttcgagaccattctggccaacatggtgaaaccccatctctactaaaaaacacaaaaattagccaggtgtggtggccacatgcctgtagttccagctactcaggaggctgaggcacaagaattgcttgaactcttgagaggcggaggtcaaaatgagctgagatcgcaccaccgtactccagcctgggcgacagagccagactgtctcaaaaaaaaaaaattcttcaagttcttattaaatgataatacatatgagtatgtatttactgcttatcagtgaacaatttattagtcaaatttgttagcttatttctgaataagtaacatgttatcatggttcaaaattgaaaaggtcccaaaaggtatgcagtgatttctttcctcctcctcctattgtccccagacttctattctgggaaaagggtttcctttccgcagaatctatgttgtcagggtcttgtgtgtacatatatttgtatttatgtatacacatatgtgtatagatggatatatgcataggtacatatatatgtaaatactttccctctttttatgcagagggtggcaaacatatatgctgttctgcatataccttttaaatgcattttggaatgtactgcctatcggtaggttaagagcttcttctttctttgttaaggctacattatactactgtatgatgacttattaactacttcctgactgatagacatttgggctgtttccagtttttcccaggatgaacagtgattcagtgaatagctctgtatcacattattttgtatatctctaggaaaaagatcctagaaatggaattgttgcagctgaaagtaagtacatttatcatttcgattgattttgtcaaattgccctccatagacgttaacagttaacaattctgctagcaatatgaatactcgtcagcttttttcatacttgtgaaaatagtaggtgaaataatgatcccagcttatggtttaatttgccctttcacttattttgagtgatgttgagtataatgagcactttaaaggaaaaaagataaatttttgtagttagatgtatatatatacatttcaaaggtggaaacctgtttgtgcattttcctttctaccccctcaaaacactaggaaattatacctagtttctagtaaattagatagctaatttctatattggtgtgttattaacagtaaatatgctgcaaatgttggaagatacctaacattctccttcatgtgattaccaaaaacatattgctgaaatccaatttcgactgacattatttttcaaaataatacatttcaaactaatcaaatcaagttttgatttgtaagggcacattacatgatatcttttaagatacaatattttaagtcaattaaactctgatgtatgttgctttttaccaaaagcacacagattatggagaactcaccaagtgactgacatgataaaaaagcaaagttcttttagataaaaatggccactttctccttgatatttttctatgggttgagatttagatgaaaatcccttgtggcaaattttaatgactatttctttaatgtaataactgaattcatctagatgatcccacgtccctcaacagagaaaggtgagagtctgttatttgttaggtttccttgtccatatttcttggtgggtcccacaaaagtctcatgaatctctacaagtgggaaaataaattgcccatttcttggcacaccgaactttccatgtcatattttaaaactgtaagtccatactttacatagctaaagaccaatgggccaaagcatggtgggtcacacctataatctcagcattttgggaggccgatgtggtaggattaattgagcccaggagtttgagaccagcctgggcagcatagtgagaccccatctctatagaattttttaaaaaattaccgatcatggtggtgtgtatgcacctatagtcctagctacttgggaggctgactcaggaagaccatttgagcccaggaatttgaggctgcagtgagctatgatgacaccactgcactccagcctgggcaacagagaaagactctgtatttaaaaaaaaaatggaaaaagaaaaaaagaccgaataataataataatatgtaatatttaatactttcatggattgggtactgttttccctcccctgtgagtccctgcctatgtttccttcaggccataaaaagaaagcttgtctggcaaatatgaaatttgaaaactgaccatctgctgaattataatagtagagatttacctttgggataaatatatttgtcattgccacaaagtttgtgaataatatttctgttgcccagtcatgaaatcaacaaacctccaaaatgaagttgctttaagtgtgtaatggcaattttgaattgttaaagtattccacactgtcgtgaaaccaatgtaaacccttgctcagaactagactcacaaaattttagagccagaaggaggtttggagatggtccagcagttcgtctcaattttataagtgaaaaaaactgaagctggggcaaggttaggaacatgttagcaagtgagtgaatgagtgagttacaaagctggcatccttgaatcttggccccagacctcacctggctaaattgttccagaaatcttgcctaaacacactttttttgtagtggaagaatgtatgcccttttagaaatcagttctaaggtctcttagtaaaaccatgtggtaggtcatccttaactgggggttggttttgctgaagacagtgagcacaagagaaaaccacagaatgctctttctaagaaacatctagacagcactcatgaggcatacacttggtgttccctccctctctttttcattggtaggctgtaaattactcccctgttggaaaaataaggtcttcaggctactcacggtggtgtgcagacgcacatacacaacagtgacagctttctagtggcttccgccatgcgtgaaaagagatgcaaaaggaatgcaggaatgttagagaaaataaaggcatcgccgctgattagctgggactgatcagagatgggttacttcacgtgaagcatgtaaggaaacctcttgtaaagacttttattatatttttaggaaggaaggaagaaagacagaagagaaaaacagagaaggaaagggaaggaagaagggagagagggaggaagagaaagacagagggaaggagggagagagcagggatttacctgcattacaggtagcataccttctccaaagtctcctttgtggaccagagggaccattggtggcagctcccttaaccacagtccagaactttcagtattaaaaacttagctgatacctctcaaggatatatatttactgcaggtccttcatctgaaattcagacacatgtagctagctacagatcacctataagatgtttcaacctcaacaaatttgggacttaacccatcatcttactccctccgccacttcctttgcttgatcttcttatctcagtgagttgcatcacagtcctccaaactgatgaggtcaaaactctggtaattatcctcaattctttcttctgtcccacctctagccaccatctaggtcaaacagcccagctgactgcacctcctttgtgtcttccccactccatcccctgcctgctgccactgccttagttcacagcctcatcatttcctccttgagttgctgcaacaatctccagctggcctctctgccacccagtttttgcctctctccaacctgtcctcctgactcttgccagagaaatttttctaggaaaacctacccaagcacggaatgcccctgtataaatgctccatgggttgctgagcacccccagagaaactgtcgtgactgatccacgctctcacttcctcggccttgcatcgtgctgtcccctgccctcccaggctctgtgccagtcacccaggcttccctcagtgcgagcatctcctcacctcctgacctttgcacaagccactccttctgaggagcactctctgtttcccctgcttctctcctccttgcctaactcctactgagctttctaatctgactttgagggcacttttcagagatgtcttccttgaccaaccgagtagacttatttaacaaacacttgcataaatttactgtgtgccaggcactgacctaaaggctttacatatattccttcctttacttctccaaactttaggagaaagggaggattccagtccccattttatggatgaggaagctgagaccttgcttgagtggtgaagcagcttgcccaaggtcacacagccttgtgggccagaagctacttctgcctttgtgtggctcctgattttgatttgtatgtagtataaatatatatatttttgtgtgtgtgtgtgtgtgtgagagagagagagagagagagagagagagagagatttatgttccaaattggttccgggtttgtcatctgtatatttaatatataataaattatatatacaatttattttttgaatagacaatagaagcacatattataaaattcaaaaaatacaaagtgtatacagtgacaggagcctccctcctcactttacctcccacttctccccaaaagcagctcctgtcacccatgccctgtgtatctttccagggatatttacaaatatatatgtagacactatgtgattttcttttatatttatgatagcctattctgcttgagatttttaatttgctttgtttgattaacagtataccttggggcttgttccatatcaatatattaagagcttcctcttctcttctgtgtctacataatagcccattgtagggatataccatagtttatttaatcagtctcctttttggatatttaggttgttctcaaacattttctagtacaatcagtgccgcagagattagcttcctacagacatcattttgcacacatacgagttgatctgcaggataaaatcctggaattggaatttgcggccaaagggcaggtgcatttataattttgatagatagtgccagattgtccctcataacggatgtactcatttattttctcattagtagtttatgagattgccccttccttcttagcctcacccttgcctatataataaaatgttttgatgttcacccttctagtatttttaaccagcttttttcttgttatgagtcgttatgcatcttttaatgtgtttatgaactatcttgattttctttattagctgatttagtattcgttggctcttttcatattgatttataggcatttcctatatattaaagaaatatatcctttgtctgtgatctatgttccagataggtccctggtttgtcatttgttgatggtgttttttccccatgcagaaaatttttattttcatgaaatcagatttatcagttttttttcttttatagcctctggggtttgagtcatagttaagactgaccttccccacgcctaaattataaaatcctcttctatgtgcatgcatgggtgtgtgaggttgtttcaaagaaagaagtgatagagtgtaatcgctgagaaaaccaactgtggagtcagactgacctaactgccctggtttcatctctatttctttaatcttggatgaaatgtttaatgggttagtaatatctatatcccagggttacaggtgactatgaagatcacataccacaatataggaaatcgtcctgtattaaattactgatagctgtttttattgtgttattttctccaagtttaataataattgcacaagaacaagggccctttcttctctttcttttgctttccccttgccattgtggcccttccccttcccaaactctgctgccagcaagaccttagcgtggtgctctgctgatgggactcgagtgctcactttgattgcttcactgtttattttgattggcgacagagaggcctggagttctggctggagccacctggagtgccacaggtgcttctccacttgccacgcagctgttctcccagtcccttgaggaccctggcgcctctccagatcttggcacttggtttctttccatgggtcaccggtgagagtccgtgttctttcctttgggccccctgcagccccttgccacagaggcctcatcccgagaggacttgagacagcgtactccccacatgggtgccctgtaaatatctttgaccaaagaagttaggagaagtaagaggtttggggtgtcatattgactggaagagccacaaatctcttggctatctcttcgttcccattgattacacaggaaggaattattccaaatcatgtatttctttagtggatgatccccttaaaaatttctacgatgtcagtttctgttaatatttactacagtttttattgtcatggattgtaacttcttaaaaatatttaatatcatgcaagctgttcaaagacaccagtaatttggagacagtgcagggaatcgggctgtgatttcctggcttttatctgtctctgctgctcccttctcctctcctttgcctgtttgtgtttcctttgtacactcacttttaacaaaggccccttgaaattccaggggtaggagacacagtggagcattgaggtaggtcatctcatatttaattttgccactctctggccgttaattaaaataatgcttgagtgctagtgtccagttttacagggggtgtgtaaaatgttaatcacaactgatctgaagcatccagtccagtgccagggagagggtttagggcacaggcagggagcatgttatcaggaaaaaaataaactagaggaaataaaacattttgttgttctttaaaaaattttaatatgaggccctactatgagcaaatatgaaggaggatgtgaagacgggtaaggtgcagtccgcggattcaaaggcggggccatctgcatgctgagcgttttactatactattccatttaagattcgcagcaggctgggcgtggtggctcacgcctgtaatcccagcacattgggaggccaaggcaggtggatcacctgaggtcagacgttcgtgaccagcctggccaacatggtgaaacccggtctctgctaaaaatacaaaaatgagattcgcttaaacccgggaagcagaggttgcagtaagctgagattgcactattgcactccagcctgggtgatgagagtgaaactccgtctaaaaaaaaaatttgcagcagtccagaaggtaggccccattattccgattgtatgggtgaggatactgagttgaagaggagtaacttgacattgatcccattgtacagtggagccaagattagatccaggggacctggtttcccagccccatcacctcagtcctattgcattaccctctggaaatgctcagtccagtaaaggagagagtgatgatgcaatgatgtgactgcttccagtgaagagtaaaagtaatgaactagaaacgggagaaacagattgacacccttgagttgtctttctggttagggcttttgggtttttgttctgtaatacagtccaatgtggtggccattcaagggagaagggccactcatcagccctcctgctccctcacccccatcttaattaaataagtctccttaggatctcacacacctgcatgtaacaaaacaggttttaaaaatctgtagtcaaggagcactgcttgtttctttctggcaacaatcccagtggaagtaaaattacactggactgcctgaaactctgagcccaaagcgttaatttttgaaaaacgtttgaggttcctgagttcccgtggtatgctactagaatattctgtagctttaacaactcccagccttcattctgcactgcaccccccgcacacccaatacctattccacatgtctggggataggtcagctcaccgtccaccctcgctgccccctaggctgaggttccctgatgagcacagttttccgggaaggatttcagcccctctgtgaaagtcttcagttatctcctctcttgtttccagaagtagcttctttactccaacttgaaatcttgctgtattccttagtgttttggaaacaaaatgtgcagtaggagaattctggctttgtggatattggatcactttgttccctggcacaacaatctctcctttgtattaaacatctgagaacagaagtcctaaataacatttttatattccttgttgatgtaagttctttatttggggacagcagtttggtacttgttcctctgtcaaattctgatgtactttccctttttcctatgatgaggacaccactgacccctagcctggaattttactttgggtagtggtggtatttgcttaccccgtgggactttcctgttgaatccctctagtctgcagtgagtggcctgtgtcatagtgggatgtctgactggtcggagcaaaggtacccaatcctccagcctgaccatgagctgggtggtgaactagccagccacaaacaagccagatggacagacagaccaaaatagccacttgtccacctccttcctggaaatgcagaagggctgctccggaggtccaagaagacctaatttggtcagcaacccagcacttactctgaacaggaggtggagttgtgagcctggtataagttccctacctccgattctttacttttaccacacacgtttgcacatttcaaggagatgatcagccacactaccaactactgatgggtaacaaatactctttacgtcaaagctcttctgatgattttcctggattctgtacttgtacaatgaatgtacttgtgcctttactccaaagaaaattagtatatgtggctgggcacagtgactcacgcctgtaatcccagcactgtgggaggccgaggcaggtggatcacttgaagccaggagttcaagaccagcctggacaacatggtgaaaccccacctatactaaaaatataaaaaaattggctgggcgcagtggctcatgcctgtaatcccagcactttgggaggccgaggcgggcagatcacttgaggtcaggagttcgagaccagcctggccaacatggggaaacattgtctctactaaaaatacaaacattaactgggcatggtggcaggagcctctggtcccagctacttgggaagctgagacaagagaattgcttgaacctgggaggtagaggttgcagtgacctgggatcatgccactgcactccagagcgagattctgtctcaaaataaaaaaaaaaaaagaaaaaataacaacaaaaaagaaaattagtatatgtgctttactctttaggcaaacccaatattatacaaattcagttttttaagacaggataggacattttatttttcagaaaatgtataaccacattccttaaatggcgtaggtagtataatataaatatggtttatcccctaagaccgtttttatttctatgtgagtttcaaagctctccctttttcctattcattcaacaactccacgctgagttgtcttatgggaggaaaggctgccctgcatggctctcttgcagctaatgaaatgagcagttggctttggtgttttatcactttgggtcagagatctatttcttgctccttactccttcagtgaatatctagttcgtgctccctatggatcaagcatcgtgctggtcttcttccatctgccttgttcccagtgggagcagttggaaggatgctgatggtttcttcctccaggagaggaagggcagtgtttcatgtcactcacaaccaagcagctagttgtcggctcttggaaaactagttcaccaaagggaagcactgagcctgaggccctgggatgggttggattcttttctaagtggaataacattctactcctcctgcttaacctttccttgcaaactaaaatgggaaaatcactctatggacaaagtcaagcagaaataaaaaataccctctctgaggcagcctggcagtacctgcatgaatcagccagtgtttggataagaagcagcccctcgagaaggaatggagcccttccctggaccttaattgatttttgtatttgttcttcttcttttaattctttgtggaaaagtgatttgtactgcagagtggctttaacatattatgggtgctgttttatgtaatactgttcttatctaaagatcatttctgcttgttttgccctattttttttcctgatccagctcatgtttgtttttctttttcattttatttcttctttttgaaggagttattgttcctcttatttctcccacttcatctacccccgttatctgccaggagaataggagaagacatgggccacttttttttttccatttttaaaatcaattggctagatatcacctttctctcgtgagtttgtttcataacgcagagcctcattagtaacgaacctgacccttaagaagttgggttatgtttattcctagggattaaggcactgttctggcctggttggccctttgctgtctgtgctatcgtccgcccctgctgaccagggcgtgcctggctcatggacagggcagctccttgcagaggtaccctgctgtcagggaaagttctatggactagtaactgctaagatcttttttgataaaatgagatcttgaagccttcaatcatgagcctcaaacaatttacataataaatccagaacttggagatccaaaagatattgccatgtttttggttatgttgctagggaactatgcctccgttttcaaatgatacattgctgtgtgtgtgcgtgtacatgtgcatgcatgtgtgtgtatgtatggaatgaggaaaattaggtgtttcatgcttatgcattgtagtgaaggctacagtgttgttaggcttttctgatggatatcataactcaaactacagaatttgtttacagcagtgttcatgtgaccaagaaaaaaaaaagcagatgaaaagtagccagacgtgttcaaaacacaactaatagatcaggtttctggaacatctgagtctaagggtttggtcttcctcacaatatgttgagaggtgatgttttaaaagcaaaaacggagaaaaggccagctgtggagaatggtaactgagacaattagaaagcagatgtgtgcaattgaatgtagtcagccttaaatggatccacactctcttctgtatgagggtctggaagggagagttcacagaataaaaatggagtcattttattctttctgttcaatatagattcccacatacagcgagtatttgaattgtgacttgctttctcattggcgtaattcccacctgcctttggaagtccattccgaggtgaccttgccccctgcaatatggaatgggaaaacacctggctgagtctagacgtctgataaccacgtaggtgggtaaggtaaccactgggatggctggaaggtgttacccagggaaactgaaggccaggatgaaaataaaagcaaacggtttccccttgggcaatgactgccatcaggattctgctgctgataaaatgctgctcctttgttctgcttcctgcgtgttcatccatatgatagctgttagacatttcattcagctttcacccacctggcactgcttcagtgccaaccaacggcaaggtgctccccagctgccatggggagccgggtacaaatagacctcagcgaagccctgcgtgcatgcaaactgcgtttgccttttgcattctgcttttctctcggggccatgcttgggacacttacacgctgcccgctttctttctgtgatgggggctggtgcctttgcactaggcccccacagtcatcaatagccctgttcatgtgggaggtgacagcaacattttgccacattacaggctgcagggctcaatgtgaacattcttcttagagtgagcaaagggcatgggacttctgacggccagggaagtcacagcctgcaccacagtgcgaagatcctccatctgggccatggggagcacttagaatgtctttttatgggttcaataaaatgtgatgaacaaatgtttgtggtgaagctctattgtgaggttttctgatcatatgtaacataattactgaaatctttgtcaggcattgttttgcatttttatctacaaaggaagccagtgacaagctcaccactgttctctgttttccctttagtcggttcttaatcatccaagtcaatagagaaaatcaccatcatcgatgacgcaaacccgtaaaaagtccaaaaataatttgtgtttgattttgagatggagatggtaggcatgtgaacaaaacgtgccaagacatttaggctactttgaggtccaggccaatgccctcccaactcggctctgctccccctgaagccggagaccgtgtatagggatctgggggaccggagggcaacgccagagaacaagtggaggaggtggctatcaatcctcagagtttgtcatccactatgaagaaagctggccaggttttgttctgataacatcacatagatattttatactttttaaaagatgatcagagtgacatctgtgtggttaaaaagccaaataacacagaaggcttttaataaaaaataacagccctgcctgggtcctgtccttccttggtcccactttccagaggaaacacctttgaaccctcccagctttgttgaaagttctttgggtggctaccttcatatctttaaataatatatggtagtaccatttgtactagttttctagggctgctgtgacaaaataccgtaaactgggtggcttaaaacaatagaaatttattatctcatagttctgagggctggaagtctgtaatcaaggtgccagcatggccacacttgttctgaaggctcagggggatccaccccccacctcttccagctcctggaagtgccatcggtccttagcttgccctctgtgtccctgtgtgtccctcctcacatggcattttcctctgcctataaggacgcagtcctattgggttagagcccaccctaacgacctcctcttaacttgattacatttacaaagaccgtgtttccaaattaagtcacatttacaggtactggggacttgaacatatcttttgaggggacataattcgacccataacactactctttctcagtttattgccttccttttatagtcaatggggtttctctccctgattcagcctcgtctgtgtcttctctcagacctcttccctctccatgctccgtccctccacttaaaggacattgcttatttctcaaacaaattcttggaaacctcatttctcattctgttgaccttagagagcatcacttaattactcatttaaaaaatgaaagcattcactctttcggctcccatcttctacctctgagcctctgtcagctagggccaagcttgatgccatccgtgttcttttcagttccctgaatggttaaatcctctgtcatttgtcctcagacgaagaatggatatttgtctacagcttctattgataggatctgaaagttgaaaaccaataaacagtgttatcgtgactctgtctcctggattattatacctttgcatgccctctgggttttaattaaaatactttataccatttgaaaaatgacagcataatttctgtttgtttagtactttagaatctacatttatttgattttagatggcagcatactttgcttgctctgaattgggaaactgtctattcgtttttcttgatgtcctttggcattacatattgaaatgaggctttgtgtcttataaatgtttgatcacatgacacagtagccgcatgggtctctctgtgagtttttagcaacaggtaagccattctaaggtagtgctagccaaactttggatttcaatgcttttcatttcttttttttaaagaccaatacagagatgctaactttttattttgccagaatgggatattaataaatcagctattatttactctcactggtaaaataagaacatttaacatgaaaaacaaaatagtaaggacataaccttggaataagttacacaattttaaaaattttgaatgaatttaactttcaaagaactcattactttccctcatttttcccatttggcatagactggtgaaaacattctgaatggaatggttgtcctagatcaaccttgtttagtggccatgtgtctggttttaatagagtagaacatactgttaatgactctgcttactctgtagatggttaggttgattgattaggacctggtatggaagatgtgcaggagaagggggcaggctttgtgtgaagtgggagagttggatcgccctattttgtgaccctaaactgtaagtagaaccccataccccttgccacatgcccctagtctaagccatttgtaagctgagctagctcacaaattcttgcccaacatgtgctgtgttgggcatgaatttaagtagatacatacagatctgtcacctttatatatgtagcccttgagtaagtcacgctttcactgtcttaatttattaccataaagttggccgggcatggtggctcacgcctgtaatcccagcactttgggaggtcaaggcgggcagatcactcgaggtcggaagttcaagaccagcctggccaacatggtgaaaccccgtctgtactaaaaacacaaaaattagctgggtgtggtggtgcacacctgtagtcccagttacttaggaagctgtggcagaagaatcgcttgaacctggaaggtggaggttgcagtgagctgagatcacaccactgtacttgagcctgggtgacagagcgagactcggtctcaaataataataatttttttccataatgttgtcttcccatatatattttaccagcttgaggtaatataactagtaaaacttaagcattcaaccaatgcacaatgacaccatttttctaatcttctctgactaaactaagtctaaaatggaatattattgactaaatgtatcccatcgactatatttgattaattaaccatcaggtaaaattctttctctccttaaggaagaagagattgggattaagattggttatcagtcatacccttgccacattgaattgaattcagttttcagaatgttaatgctttaataggaagttttgtgaaatcccttcagataagaagaaaattaatttcttacttttttttttttggtaagaaatgtttgtgtgtgtggcggggggggagggctgcagccaaccacaggtgattttaatgatggtaatatatagcaccttcctaggaccatgtggtttaaaacatcgatgaggtcctcttcacaacatccctgagaggcatttagatattgtcttcccatgtttttttgcacaggggaaattcaagacagactgaggttaagaagtgagtagcccaagtttagtcagcaggtcaattgcaaagtgagaaaaggaagtccagctctttcaaaccacatctcttatcctggctaatgaacagcatctccctgagtccatactctcaactttaagattccactctaggccactttactttttgaagatctgaacatttgaatgaatcagatacggctttccaattagaagtgtagacagtcgtgtccctcaaggtttcattgtaaggataaatgaaggtggtgatgcttttgagcccctgggacataggccagtccccagagaggaggaagcagctctgaaccagcagcatccctgagtttgatttgtttatcagaagtaatggtttggatagagctgtccacactgtcatcccattttattggtgaccaggaacatataccacagaaaagttatgaattatgaaactagagaaggtgacaagtgctggctttatgctgctctagctctgtgtcacttaactcttttggacctcagccatgccatcagtaaaatggaggtcatgatgttaactcctttccgttgtctttcatcctttgattcttctaaatgcccttcatcggaatcaaactggcagccgtacacttgccaggtctatgcacacagcagtgagctctgcaatccaaggaccagatccaagtacagatagggcccatgttttgcagctttgcattctttctcctctacatttcatctctgcctgcattccatgtcacctttggaagacctcatatgtcactgtctttctgccctcattgaacagagtgcactacccgtgagcttccagtatggtgccttctggcaatctacttgaagatatgatcttcattttggttgaaatctaataccccatgtgaagaacaaggacagtacaactcaaaattctggaccactgcatatggtatcttttctataacccatattttaaatacgtgtattaatttataacacaaacatatggatgtttcaaataacgttgggctataaaaaactggtattgataattgtgaccccaatgatgagaagcactcatcagaagaagaaggaattccattttttttttttaaggcagggtcttgctctgttgcccaggcttgagtgcagtgacatgatttcagctcctgcaacctctgcctccctggttcaagcgatcctcccacctcagcctcccaagtagctgagatcacaggagtgcaccaccacacccagcttttttttttttttttttttttttttagcaaagacagggtttccctatgccgcccaggctggtcttgaactcctgacctcaagtgatccacccgcctcagcctcctaaagtgttgggattatagacgtgagccaccttgcctggacaggaagaaggaactctgtctaagcacatttttggttttgtccagtcatgttgtttacacggccattgttacaaagcagaaaagccaccaggcatctctttacctctgaagcaagcattctaaatagttgagagtttgtggtacataaaaagaagccttctctcatgctaatgttttcaaaacaagttgtgacttctgaaagtagagaccaaagaaagaataacttgaacaagatttcagtgggtagaaaataaacactaactttatatgtatttcaagaacgtaaaagaaacaggtgggaaatgaatcctcctcgataagagagaaatgcttagtagggtggaaaaaaaaaaaagacaacattcagcagtttttggaactgtgcgagtccagagagtttctttctttctttctttcttttttttttttctggttagctctcatagccacaaatatgtatattatttccttcttgcccacaatttactgagaatcatctttctaatatactggggaatcccaaataaaaatctcatttttctaaacacagacaagtcttttaactcctgcaattaaatgattcaactattcatatgtagactgtaaaagaaataatcaaattgttctagtagaaatctccaacggccatctcaaatagtttccttcccaaatttatactgtaaacggcttaggtttagggaggggttttgccctagtcactgatgttttgaaataggactcagaaacctctttcataaagtctctgcggtgattgggctaccccagcaatgtgatatagtggtaggattacagaatattttaacccttttctgaatgttgcaatatattcttatatgggaaatgattgattattaactacttagaatgtgtttcttttccaagcatgtcagcagagtaagtacagcagacttcgtaggcgatcagtgtagtgtcaggtgtgagcagtatggactggagatggtctgcctggattcaaacctctgctctgtcctttcctacccaggcttttctggggctccttctgctcatctgctaagtgccacgtattacagcattttcctcatagggctgctgtgagctttaaatgcgtttatgagttaactgcttagaacagtgccagctatgtaataaacactacgtaagtggcagctacaccatgcataaacaaacgcaaactgtgtgcatctgaggaataattctagttaacattaaagtgtgtttttgtgtacagagttggtgtctgttgtctgtgcattcactttttaaaaatcgggaaatagcagatgttaggaacctatttattttgcttgctcttccttctactttctgcttgctacctactctattctagttccagacttgatctgtttctctgtgcagggttgctcctatgtacaaccaatgcagaactgaccccatcaaatttacaaagtgtattagtctgttttcacgctgttgataaagatataccttagactggacaatttacaaaagaaagaggtttattggacatacagttccacgtggctggggagacctcacaatcacggtggatggtgaaaggcacatctcacgtggcagacaagaggagaggatcaagtcacatcttacatggatggtggcaggcaaagagagcttgtgcagggaactcccatttttaaaaccatcacatcttgtgagactcattcattatcatgagaacagtgcagaaagacctaccaccataattcaattgcctcccaccgggttcctcccacagcatgtgggaattgtgggagttacaactcaagatgagatttgggtggggacacagccaaaccgtatcaataggtatggaaggaagtaaaatactattttttggtaagagctctcccactaagatatgaggacatatgcagaaagtgaggaaataaaactcaaagaaagtgaggaaataaaactcaaaattggctttcaaaagcaaattttctgtcagtaagatgtgacacgaatgttaaagttttaacaggttttgtttccttgtaaatatttacttcactatatctaataatctttgtgaatgaagatctcattggtgtcttttttaagatattaagaatattaggattacttatatttgaggactaaaagattggtagagacataattctatccttgtggcttctttgcatactttaatgctaaagttcagtacttaagattgaataaaaatgtcttgacaatcagatataaaataccttctttgggctgggcacagtggctcacgcctgtaatcccagcactttgggaggtcgacatgggtagatcacctgaggttaggagtttgagaccagcctgaccaacatggtgaaaccccatctctactaaaaatacaaaaattagctgggcgtggtggcaggtgcttgtaatcccagctacttgggaggctgaggcaggagaatcgcttgaacccggaaggtggagtttgtagtgagacgagatcacgccattgcactccagcctgggcaacaagagagaaactacgtcaaaaaaaaaaagaaaaaaaaaccttccttagtgtcagtcactctttttcttttctttctttctttttttttttgagacagagtcttgctctgtcacccaggctggagtgcagtggcgggatctcggctcactgcaagctccgcctcccgggttcacgccattctcctgcctcagcctcctcagtagctgggactacaggcgcccgccaccacgcctggctaatttttttgtattttttagtagagacggggtttcaccgtgttagccgggatggtctcgatctcctgacctggtgatccgcctgcctcggcctcccaaagtgctgggtagtcactctttttcttaaggttacacagtcatggttgactttgtaggggctcaggacatgccaccccagactatcatctccttttccaaggactgttccaatataatttctagtacctgagagactttctctgcataataagacacacttgacccaccatacagagcctcccctcatcaacgcacagcttgtgtccccaccacccccagaagccccaagcccctattccgttccatagctcaggatgctaaatgagtttcaaccgtgtgacccttcttcaagtctcatattttgtgggactcccatgtgcacctacattattaaatatggggtttctttctgttaatttgtcttacgtcaattcataacccagccaagaaacccagagcggtggaggaaagccatttctctctcccctacaacttttaaatactaaaattaaaaatgtccccacccaccaatattggaactccgtggtatccataagctgggttgcatgttagtgattgtaataagcaataaaaatccttgcatgtcaatattttattaaatttgattattcatggatttgtgaccattattatttgctgtttattggtttgttgttgtttttaaaatattttacttggacttatggaccacatgtttgtttcagaaattcttcaaaagacagcaaatccctagtaagtgggaagaaaaatcacttaacagtattccaagtacctcaaaagatgcaaatatggaaagatgaatatgaaaaagggtactcctagagtttatcaattgtctatccctggagaaagtttccattctccattaagactccaacggctttgaatagtatatgcttttgtgtatacaatgaaaataaaccatcatcatcgtcatcatattaactgggcttgtgcccattgtagatttcatgaaaaataaccaaccatcaaaaatgacttgacaggagaagccaacaagccctaacattaaatggtcctgtaaaagtttgcaggtatattatttgtgtattcagtaatactctcaattagtgtttatgacttcattaacttaattcatttttcatgaatggtaaaaattcactctttcctacattcacaaatgataggctattttgatggaaaaccaaagactcactatatgttctcctttgcagtagcggtagtagttgcagccaccaacttcagatgtgcagttcctagtttactatgtgattcagtgtgcttttattgagggcctccttgtcgagagagagtataatacactagcaggagtatatgttttggagtcaaactgttcttggctcagatcctggcacagctacttgcttactgtgtggtcttgggcttcctggtctgtaaaatacccgccctgcagagttcttgctgagttgaagtgagaggatgtatgtgcaagtgtgcggtgcggcattcggtgggtactccacagcactggcttccctttccttccacactgggggcctgctcctctaattcctgttcaccaagtagacggggaggaagagagtggtgcctgaaactaccattttttttagtgagtcaaacgtgtcatgttgtgacatcttaggcatgtcccttcaccctgggggtcttggttaactcctctgttaaattcagagcttgcctttttttttttttttttttttttgaggcggagtcttactctgtcacccaggctggagtgcagtggtgcaatctcagctcactgcaacttccgcctcctgggttcaagcgattctcctgcctcagcctcccgagtagctggagctacagtcacgcaccaccatgcccagctaatttttttggcatttttagtagagactgggtttcaccatgttggccaggctggtcttgaattcctgacctcaagtgatccacccacctcggcctcccagagtgctgggattacaggtgtgagccaccacacttggccagttgacctttactttatgattatttctaaagcacttccagatctatccttctgtgatgctatgatactatgaagcattaagttgagactaggagattaacagtagggtgttaaatggacaggactgatcacaatcttatatggtgaaggaagaaccaattggacttagtgacacattaaatgtgattagacatgaattggaaactattttgaggtaatgttccccaggatgccctctccaaaacactagttgctgaggatgggaatagatgttaattgaaaaaaggtttctgaaaagcatttgggaaatgctaacttcaccaggtttctttcctgcaggacttctctgattctttaatatgcccatatgcatgatgattctgaaattggggaatgtagtcatagtaggaagcatttctaaagcttatttcttcatggaatcagaattatgttgcacccaagtagcatcttacaggaccagtatttcatggaaaatactctgtgaagtgctgctctatggttttaaaccaagaatgaggtacaatataggggcattgactcaacccagtgaatgtgctgagcactgacctcgcaagatcctgtggagggcggaaatggataagatcccacctctgcaacaaggctggcaataagccattagtggtggcattgtctacatggctaatagcagggatgccttgggggagacaatatcccaccgaattactgatgcagattcagttgaggcagtatccccagggtgcaaagtcctgatttctctctcggatgtgcttattctctgtctctctatgaagctcttataatggtattagcatccagttcaccacggagaaattctgcagataaaatgaacgtaggagctaaaccaatgggaagtttcattcaggagaagattttacaaaatggactctttggacttcgtttttgagtacatagttatttgaccaccatttctacacttggccttaaagtcaaaatataatctaaggcgagaagtctaaaaactatgtagtagacaaccttgctttactgtgaaggacatggcatctcaatgttggcagaacctgacgacgtagtttgtttttatttctcattgatgaaagatgagccagaggcctgatggcagattttactgggaaggaccttttctcaccggtcagatccgtggattatttcaccactggatttttctgcctgttaggcctttggaaacattttggcagattgagcagttattttgctcatgttgtgagtagcgtttctctgaccttttgttatttactgaaacaatccagcctgttttcttttaagagaagcgtgaaatgaaggggagtcagtcagcacatgctgactctggtatcagaaggctaacttttgggctgcttggcaccatgtatgcttttaaagttatggggtcattggcctctttgtttcttattcccatgattttgaaggagtcttttgggggaatttttttttccttgctaaagcagatgcatgtaaggttagtaattaaaaaaatatatttcactatgtctataaacataaccctctaagttttcttacgacatcttgggcatggtagattatctgaagcctctcctcttttaaacattgatgtgacgtgatggggaggccagcttggcactggaatggtggcttggtgacagggcatccctcactcctgacctctcatgaccttgtgagtccagacagtggaggtgatgacaccattcaggacgctctccaccagccgcaacagggaactccttctccctagtgctctgcctacctatgcccagaaaacctatctccctgatgtttttctggttcttcccctagtagaagatttccattctttgcaggttgacttgcaaggataaaggaagtaccaagatcctattgtggccgggcgcggtggctcacacttgtaatgccagcactttgggaggtcaaggtgggcagatcacctgagatcaggagttcaagaccagcctggtcaacatggcaaaaccccatctctactaaaaatacaaaattagctgggggtggtggcgggcgcctataatcccagctactcgggaggcttaggcaggagaattgcttgaacttgggagggggaggttgcagtgagccgagattgcatcattgcactccagcctgagcaacagaataaaacttcgtctcaaaaaaaaaaaaaaaatcctgttgcatcttcaaagatgagaaaatgtgcgtgtgtatgtgtacttgagtatatgttcattcctatctccccatctatctacctgcctactgatctctttctagcccggtcagaaaattcaataggaatcatggcttttcattgggattccccatagcacttgagctcagctgctagtgttgaagacatcactcaaatttgtcttgtttattctcgtagccaaacataaaaatgatcattacctacataaactaacctagatgatcattaattgaggctatttaataatgatctgcatgtttgacaatcaccattgtctaagaatgggccatggctttaggaatgtttcattcatttcttcagtctttcagtcaacaaataacacactgtcctaggtgctggggacacagtgtgagcaaagggacacaattctcatggtgccacatgggcaataagtaaaaccgaaaaataagaacgtggcagacaacaaaatggataacgtagggtgtaactggggaggatggtgatatggtttggctgtgtccccacccaaatttcatcttggatcgtagctcccacaattcccacatgtcatgggagggagcgggtaggatgtaattgaatcatgggggcgggtctttcctgtgctgttgtgataatgaataagtctcatgagacctggtggttttataaaggggagtttgcctgcacaagttctgttattttctcttgtttgccgccatgtctttcgccttccaccatgattgtgatttataattttctttataaattacacagtcttgggtatatctttaccagcagcgtgaacacggactaatacagggggaaggctagtttaaatatgagtttcacaggacctgtttctttggcttgaggcctgtgagatgaggagccagccctgagaagtcctgaggaaaaacttggagacagaaggaagaacaaacggactcctctcccactgaatgacctcatgtatatgtttgccacttgggactatgacctgatgcctctttaaacctctaggtcattgggaacatccacaaaacagctgaaagatgctgttttgttagaatgctcgttgtaatgcaggatgctggtgaacccagtgtgaacttttcaaaaacctattgatcccaccccacccactctctagagctctcatattgacaaaggatacctttcacagattagaaagtcagtagactccatttcttagaggaaagttgtggaaaatacttaaaaatactgtgagtagaagaaagaagcagtttagagcttcaaattcaatcgggctaagttgggcaagctactgccttataggcagtaactttctcatagaactttaaaaagttttattttgcaataattatagacttgtgggaagttgcaaaaatagtacagagagggcccatgtactcttcatcctgcttcttgaatggtaacgtcttgcataacaatagtaaatggtatcatgtatatagcatcacattatcaataccaggaaactgacgttagtattaggccttaaacagatttcaccatggtttatgtgcactgatttgtatgtgtgtgtgtatctcaccccatgtctagattcctgtaaccaccaccgccatcaggacacagggttattccatccctaccaagaaactcccttgtctccctgtacttttatgtatgagaaatggcagcagatgctgtcctgcttttagtctgaatcatattctggaaaaatctacagtgagagaaggtggatgagtctttgaaatctattggttgaaatgtattggcactgagaatctgcttaattgatatagaaatggagttccttggtctgacttatatgaagaccatctacaagctcagaaccaaaaaacacaggtttgaataagtaaccctgaccacattatgagagtccatcagttgatgctcaattggtttaagaagctaataccagtcatgtggcctgagtagtttatttctaagaagaaaactctttctggcaccacacaacttgggggattaataatatatatatggagcgtttggcacatttctcgaagatgacccaggaagcagacacaccagtaatgggttaacaggtcacccgaagagtgggtgcattccttatggaaaacagaacacatgatagaaaaatagccttttgtgtgtggaggcaagaaacctttaggacgtgcagttagcagtgagaacttaaggaaggtgcaggctgaaatggaaacacgctataaacagattgagagagagacaacagctttaagggaaaacatctgtctggtggatctgacatccaaaagttgcatctgtggtctaggaccaatcttgtaacgcttaaaaaaggaatccacagaggcccaaagcgggctctgaaagtttctttctttccttgagattttctgtttgctctgcccagaatactgcctaggacggatgaaatgaactcatctggtcctgtttctcaatgctgaagtagcacgccagagaagttaactttagaacagttggttgcagcaacattttacctggattattctagacatactgataaggggagtccatttactctgccaaacgaaacttctggaaatctttttttttaaagacagtcttgctctgtcacccaggctggagtgcagcggtgcgatcttggctcactgtaacctccgcctcctagattcaagtgattctcctgcctcagcctcctgagtagcaggaattacaggcacccgtcaccatgcctggctaatttttgtatttgttgttgttgttgttgtttttgagacagagtcttgctctgtcgcccaagctggagtgcagtggcgcgatctcggctcactgcaacctccgcctcccaggttcaagtgattctcctgcctcagcctcccgagtagctgggattacaggtgcctgccaccacgcccagctaatttttgtatttttggtagagacagggtttcaccatcttggccaggccagtcttgaattcctgacctcacaatctacccacctcggcctcgcaaaatgctgggattacaagcatgagccactgtgccgggcctaatttttgtatttttaatagagacgaggtctcactatgttggacaggctggtctcgaactcctgacctcaagtgatccacctgctgtggtctcccaaagtgctgggattacaggcgtgagccactgcacccggccgcgaaacttctagaaatcttgagagtgactcttccaatattttgtatttcaagtagaagttttcagtaataatgaagttgaaagccagaagagaggagcagataatgttctcatgaagcctcagaagacattaggagcatctatctcgatattagattgaattgaaaatttgtcatattagtcccttgacttattcatattttttctcttgagccattggtttgtgttctgtaaacacagcctaagaggctattttaaaggaaatggagatcaggtgttctccatagattcccatgctcgatttcccggagtgggagcaggagagaattatgagcaaagagtttcagccctcaccctgggacattacccctcctccctgcacagacttcacagtgggatgctggtgaattttttaatgttaatttttatttttaaatttaacttttattttaagttcagcggtacatgtgcaggtttgttacacagataaacttgtgtcatggggctttgttgtacagattattttgtcacccaggttttaagcccagtactcattagttatttttcctgatcctctccctcctcccacccttcatcctctgataggtcctagtgtgtgttgttcccctgtatatgtccatgtgttctcatcagttagctcccactaataagtaagaacatgcagtatttggttttctgttcctgatgttagtttacttaggataatggcctccagctccatccatgttcctgcaaaagacatgatctaattcttttttatggctgtatagtaagtattcattccatggtgtatatgtaccaaattttctttatccagtctatcactgatgggcattgaggttgtttctgtgtctttgctattgtgagtagtgcagatgctgatgaatttgcacttcatattcagtgattttcgccttgaagaacataccttacccaatccatgttacttgaagacgaccgtaactgaggtgtaggaatttgtcctaaattactgtaaacaactttttggggcatttcacaatattccagcgcctctccgttccctttcattgtcttctccacctgatccctctttcaaactcttgtctttatttttatacatcttaccccaaacccagattgcagtaagattcctatgtgcattgccacatgcattttcagcaatttgaaattttatctaatatcaattaagctggtataaatcataccacttcacatacgtgaagttgtttgctacagccctgttctggagaacggtgagaatgccctccttgttttgtggcaggggtgaggggggatgttttaatgaggagagactggtaataagggattgtggtgaactggcaggggaggaaattcaataaacagaagagaggaactcaggatagttgggcactggagtgttgcaaataaagcaatatgtgatgctctccccatggaatgctcacctacgctatactcagaatccctgacagccgttttgcactctccaacactggcacacaatggggtctcagggtttgttgaaataaattgggctctatatcatgtgttccctgatttctcctcaataatgtgtgcttcccagccctgcattgaaaattaggacatcaagtgacattgaagtcagataatctgcctcatgtcacatgggttgaatgtggtagatgtgatctcaggtcttttgactgcctcatggcaccttccatttccaagcctctgttttctcatattcttaaggcacagaattcatcccattacttggtctggtgttgaggagaagcttggcataatggaaagactcaaatttcatttttttttccttcttagaagaaatctgtagaactgtttcatcacaacctgtggatagctgacgcagtttgaagatctacaccttggagtcacccatctcacaaaatgtcagccggggtgctcattggtacattgtttgttgtatatttcctcataccttggaaaggactagttgaatttgttccaaaccaagcaattgacctaggactttgcatcctattagtgtcggccacaattcaaatccaactccttttcaaagttgtattttttacgaaaggtgacctgatagcgagacaagagtaatgacgggtgaggcactctcaaatcaggccagggtggcaggccgggacatcttgttttcatcagattctcgtagttactcttgacttttctgtgtgtttgctgaacttgtgagattctattgtgctctttctagctggatattttccagagggttatcaagaaaaaggagtatcttctgcattaataacctcgggaaggattttagcagtaaaattagagaccagatgatctgctggacagcaggatgggggagcatttcttcccctttcccaggagagtgtcaagttcagcatgacctagcaccagacctttcactcagtaactctgagatcttatcatatcaagttatctcagtcatgatgacgtaaatggcaaaactactacccttatttcttgggataagaatttttcgctttaaaggaatacaatatacaaaataggtgaccatgaaatatgcttggtgggtcagctaatttccatatgtgctttgtgattggtttttaagtgaatttattgctatagagttccaaaacaaccctttaacatttatgttttctgcactttgtctcattattgaaaataacaagcgctatgtaaaagcgtaaagaatatactgaggtttacagcaaggataaccaccaaagaccgggagttagaaagctatggcctgtgggccaaatcttgctcaccacgtgcttttgtaaataaagttttattggaacatagctatgcccatttgctatgtattgtctatgtctgctttcacactgcaacatcagagttgagtaattatgatagagaccatatggcttaagatatttgctatctggtttttcactggaaatgttttccaacccatgctatagatattttcatggtatttatttactgactcgtttgttcattctttcagtggacaccaaccctgttaatgacgctggggaatgtaaagataagtacatcagtctctaatttccaagagcttataatgtaacagagacaagttatgtactcaaataacagagacaagtcatgtattcatctttacctctgaccaggcagaatgcagcacgtactacagacaagaaatagctaaattgctgtggtagtttagagatgatgagagcctccgacaaaggcagggaattgggaaatgcacaaagatattgcttccataactgtggcacacagtgatttcccaatagggaacttcatgagaaatcaggctaatttccttcatggaattttataaattgtagtatccaaaagagtggaagtgatttagaatattactttgtgtccagattcctttatctagaagcatatttcccctgtaactatggggatgatcatatttatagaaaatttttgaacatttgaaggaaggcttcctttatcagggtgggaagacagaaggaattccttttcttttttgctgattgttcacttcacagtgtaatattaaatgctatgggtcttaaagaaaggcttctgtggggaaaccctcaaatatcaagtggactataaaaacaagataggctgggtgcagtggctcacagcggtaatcccagcactttgggaggccaaggtggatggatcacttgagcccaggagttcaagaccagcctgggcaaggtggcaagaccccgtctctaccaagaaatacaaaaattaaccaaacgtggtggcacgtctgtagtcccagctacttgggagtctgaggtgggaggattgcttgagcccaggagggagagattgtagtgagccaagtttatgccactgcactccagcctgggagacacagcgagaccctgtcttaaaacaaacaaacaaaaaatcaagataaaattatagaaccctaaccatggaatagcaggactcagtgacaattacatctctctcttctccacaatgcatgcgagtgtgaactgagattttggtaagttcccatttccctttggcctattgaacccctttaagggttcagcccccaaccctgggaagattccatgcatgaaaactacccaaatcctcccagttgggattaatgtgacctgataaagagttctgatttttttttttttttgagacagagtctctctctgtctcccaggctggagtgcagtggcgcgatctcagctcactgcaacctccacctctcgggttcaagcaattctcctgccttagcctcccaagtagctgggattacaggcatgcattgccatgcccggctaattttttatttttgtagagacggggtttcaccatgttggccaggctggtctcaaactcctgacctcaggtgatccgctcatcttggcctcccaaagggctgtgattacaggtgtgagtcactgcgcctggcctgatttttgtgtcaccagaattgccttgtccattatttgtgttttccaaatatctattgaattaactcgaattggatgcagacagacattgtgcactcaaaacctaggtgattgatttggaaaaagattcaagacttttaggttagtctaagagatgctcaggggaggccccttccattttgcttccagcagggtgtcaaagttattggctaaattccagcctccctttctttatactcataacaataaaggtaccagcatgaatgcagcagagttttgttttagaatataatcctgtgaagttttaccagccgaaagcataatatttggatggataaaatgtgtgtttggtgagaaagctactgaaggaacataatattggacccccaatcaggtaatttaaatgttataggaagcaccaagcccacctatttcacaggcccccgcctctcccctacccggagtagcagggctcccgcagttagccatcccacagctctccaggggctctgctctctcgttaccaagaagcacatgccagcccgtctcccagcgtttcctggtcctttcacaatagacagatggggatgctccaggtagagacaaaagagaacacacaatccatacgctcatcttgctggtacccttccgctccctgagcccaaagaggagaacccagccctctgcgtaggaagaacacatttcaaggcatttactgacaagtaggtatagttactgcatacacatgtggaggctgcattatatcaaaactgtaaataaacatagactctgcacactccttcaggccccaccatgtatttatgaatgggattgcttcatcattttcttttaatgtcagtagcagggaagtcagaaagcattacctctaaaacggggacagaacattgcaaatacatacatttccaaccagctgtggcaataaccagcaaacaaaattacttcaccccgttgttatgggccccatgcctatgggatttttcctgagtttctgatttataacaatcacttttgaaggcctcaaaatgcttaggtgagattaaattactgattatccaaaagttctgttttcgctggagtctttctggacggctgctgattcggtcccatttaaagcattcggtggcatgaactcactcggtttctgcccacatcactgcattcctgggatgccgttcacaggccttagcaagatcatctgacagccgcctgtgaggtcaacgaactttatacataattaaacactcccagttaggagaattcatttctttctccctgagaagcagagaaagaatacatgttgtgttgccctccattacggagtaaaagttgtgtggagtaatcaggctagtttcacatgatttaatgttgaaccgaataagaaagtgattgcatcctctactgggcctcacagaaaagtcaccacccacattgtttattcagactgggatcttggccatttggggtttaagccagaagaaagaggaaaaaaaaaaaatccaaccctggaatgaacgcttttgaaactctgtattcttgatgaaatgcggccaagggttcttttaaaaaaaactatttaaaatcaattaccaagatcatattttcatttacaatgggttgttagcaacagctaattctctgtttccatccagatttggtgtttaagcttcaatatgctggtattggaatccttgccgtgttttgtctgggtatcagatgctaccaccaaactatgtgtggggagttgggcaactctgacctttgaccagctttccataaaataacaaggaaaggtgtgaggaggctagggattgggtgaaaactagcctgagggatggcagtaagtgagcttcaccagggggatgaacatataaaggaggcactgaggatattgctaagggtaagagaaagcaaaagacagaatcatatgccttgggaggagggtcaggcccgttaaggcacctagtccgtctgtctctagccaggactgcaagaaatcatctcagacatgcgatcttgtatcgcatttttaaagatctcaagaggagattccggaacctcccttggtcatccgccctattatttaacaattcctacagccaggaaattctttcttatttccagcctaaaatgtgcatgtggtgcagcttcaggggaggtgattgatcgaggccacgcccacctcccccccgcctgtttactccttggatgggatggtgcatatgtcttgcttcttccttaaaatgggcctctctcggcctccataccacagtccccgggctgggagaggggtcgtggtatagaggtggggtgggggccgaccagcggcgtttatggggaccagccgccaccaggaactgttgctaggcattttatgtatttcccagaggcaagagaacatagctgtgatgtggccaggagtgcgcctcaaaaccacgtgcaaataataaatgcggaagctcccgtttcagattttaaaagaaaagaaaagaaaaaatcctgaaaaacagaatgaagagtctagaatttcactggcctcgagatggtagtctactcctcaattttaaacaagaagagcccagagcagaaaagggacctgtcccggacaagatctcagagctaatgcccctaaacgcagcgcagtgccctgttcttaatttagatagggtgctggaaaggcgaaatcatgctggaacggaggccatcgatctcacttcctccggccccttcctcctcttcggcagatgcgcagtgaatggtcaggccctccgtgagtgaattacagattcattgaagagccgtcagatgactggagcagtctggtttcttccctttttatcgagttctgtcattgtgttcctcaaactgtggtttgttccagaaaggaagaggttgtcttcttcacccgcctgccctaagttgcgtcaagttccagttccctgtattaagtaaattactaaatgagtggaatgaacatcataatgtcaagggtagggcgttgacattatgggacaatagaccacgagcccactctgtcagctttttgtcccgcacctctattatctgtcaaatgatcatattaacactctcctacctactttagggggctcctaaaaacaaatatttattgacaggttatgtattagtctgttttcatactgctatgaagaaatacccgagactgggtaatttgtaaagaaaaagttttaatggactcacagttccacatggctggggaggcctcacaatctgtggaaggtgaaggaggagcaaaggcacgtcttacatgagggcaggcaagagagccatgtgcaggggaactcccatttataaaaccatcagatcttgtgagacttattcaatatacgagaacttgggaaaaacccacctccatgattcagttgcctcccaccaggtgcctcccatgatacgtggggattatgggagctacaattcaaggtgagatttgggtggagacacagccaaatcatatcatcttataaatgtagaacacaaactccatgatatcctttatataaagtttaaatacatttaaaaatatatatatatagtttaaggatacacacatgtgaaagataaaaccatgcatggtgataatgagcattgagcatcacacagtatttttttattgtgaaagatctcgagcaaacagaaaatgcagagaataagattgtgtataaatgtgcattcaccactattttgtcatgtccttgttcttttttgtaaaaaagagatagactttccccatttccacccgctttttccttccctgaacgtcacagtcatcagtttaaatgtgatgctcaatgctcattataaccatgcatggttttatctttcacatgtgtgtatccttaaactatatatatatatttttaaatgtatttaaactttatataaaggatatcatggagtttgtgttctacattgtatttgtaagatttgtccgttgcaaaacatggacctctatacattttccatgctgtgttgtagttatcagatggaggacatggaagttatttctaattttaagatgtcctttggaagaatgctacaggtgtgtctagctttttgatatgttctttgcacaccatgcctggtagtttctcttggatatgtagccagtagcaaagtgatgaattagcacatcgtcttccctggatgttgccaaattgctctccaaagtgcaagccccttctcagcagcagggtctgagaattcctaatgctcagtattctcttcaatacttgttagagtcatatttaaaaatttttttcctttgccaatctgatagttgtttcaggtttcagttgcaatttcctgattaccagtgaggttgagcatattttcatttgcataccgagtagtcaggatttcctccatgagttatctctttctttccttggcccgtttttctattggttcgttgtttctttattggcttattggagtatgtaatgtatgcttgacaccactcccttgtccattatatgcacagcaaatatcttctcttggttttgtaattttattttgttgatgatggtctgctaagagattttcattattccttttgttttattctcataagagatctgtgagctagatgctatctctgtttgcatttttagatgaggatagtacatcttagagagtttaagtaaattgactaaggtctcacagctggtaagtagcagagctgaggatcaagtccagatcgaattccagagcccatgcgcttaaccactgcctctaagtcataactactatgagtatccccattttacagatgagcacacagataaggcccagagaggttcactgatttgctcagagtcactcagcgtggtagtgttggaacaaggactgttcctcaggtcccagactgccaacacaactgtatacctagattgaaatgttggggaaatgatcggtgatagactagataaaggaaatgtgatacatatacaccatggaatactacgcagccataaaaaggaatgagatcatgtcctttgcagggacatggatggaactggaagccattatcctcagcaaactaacacgggaacagaaaaccaaatactgcatgttctcacttataagtgggagctgaacaatgaaaacacattgatgcagggagggagacaacacacactggggcctattggagggggcaggaggagggagagcatcagaataaatagctaatgcatacggagcttaatacctaggtgatgggttgataggtgcagcaaaccaccatggcacacgtttacctatgtaactaacctgcacatcctacaaatgtatcccagtgcttaaaataaaataaaattaaattttaaaagaaaaagaaaatgttggggaaatgtgcagaaaaagatcatgtatacccttttaaacagtaactttaaaaattatgaactatttaatatttaaaatacaaaatttacagagaataatatagcaaacaatcaggtaccccaactcagatttaataaatattgacattagccacattttaaaaatattttttaacagaaaatgttgtagtttaagcctcttttgtgaccccaaactgacagcattcttccacagctttcccagcagtaaacactctttagaagttgcactgttacatacctgttgcattttgctatgtgattatgtgtcataagccaggggtccccagcccccaggccatggaccggtacaggtccgtggcctgttaggaacctggcagcaccgcagaaggtgagctgcaggagagccagcatgaccacctgagccccacctcctgtcagatcagccacggcattagattctcataggagcgcaaccctattgtgaactgtgcacccgagggatcttggttgctcgctccttatgagaatctaatgataaatgtaatgtgcttgagtcatcctgaaaccatcccccacccccgtctatggaaaaactgtcttctattaaaccagtgccagaaaggttggggaccactgtcataaacaataactagtatcattttgcaagtttaaaaaacgaatggtaatgttatcaataatccatctttctggaacttgctttatcacttgaagttatgtttctgagatttatcctaattaatgtatgtagagctaattcctttaactgttatattgttataaactgaatgtttctttccctgcaaaattcatatgctgaaatcctaatcccaaatacgatgctattaggaggcaggattttggaggtgattaggtcacaagggtagagccctcatgagtgggtttagtgcccttctaaaagagaccccacggagctctcttaccccttcactgtatgagggcacagtgggaaggtcctctatgaaccaggaagtgggtccacaccaccacatctgctggctccttgatctgggattccatccttcagaactgaaagataaatgttacataagtcacccagtctatggtatttgtgttatagcaacctgaaaagactcagacataaaccaatttctttctataaatatatcataatatatccactccctaactgatgtttccaggttgtcattttataaacagttctattgtgaccttctctggacttgtttccatgtggatttgttgaacttttcaaagatacagaagaagtggaattactgggtcttggggtacaaacatcataaaggttggtaggcgttgccaaattgctctcagtttgctttcagcaacaatgtgtacaattcttattattctgcatcttctcccactcttgacattgttgggcttttaaaatttgctaatctgatgtattgaaaaggtatttaattgtcttgatttgtatttctctgattacttatgaggttatgtgtttagtgttggtttttcctacggtttttcatcatttgggatttttttctttctctttgtattacctgactctagactttgctcacttttttgtagtgggttgttttttccttatagagtactaagtgttcactaaatattatgaatacttacagaaattttctctctccaaggctatttattgcctttaaacattgttttttggcatccttcatcacagaatgtttaacatcaaatttctcaattttatcttctttccttcttcttcttttttactttatggtttgtatttttttttgtcagtccctcacttaagaccataaaaatagtgtctaaaaaacattttttcctaaatgttttaaagttaactgtaattctcttggaattcatttttggatatagtgtgagttagtgatctattttttttctccatatgggtaacagttgtctgcgaaccacctattagtttagtttttgttttccccatagtttgtaatgctatctctgtcacataccaaattcccacatgtgtggggctctctctattgcgttagtctagttatctatatttacaccaatactatagtgtcttaattttatggcataattaagtatattgtatatgtcttgatatctggtaggacaagtccccatattattctttttcaaagttatcttggctgcttttggaccacaattttaaaaccggttacaaatatccatgaagaaaacctttctgggatttttatatgaatttcattcaatttatgtattaattttaggggatttgatgttgaaattgtggaatcttctcactcctgagcatgagatatatctctgtttatttaggtcttatgagtttcaatgaagttttataatttttttttccatataggccttgcacctctttctttagatttattcctaggtacctcacaggtgtaagatctctattgctaatgacatcttatgaaaattacattttctaattggttgttactgatgccatggatgtttgtatattaatcttgtctccagcgtccctgccaaaccctcttatttcttgtaattgttcatagtttctcatggattatctatgtagacaatcttatcatttgcaaataatgccacatattcccccttcatttctaattctgattttcttactcctttttcttgctttattacatcagcaaggtatctcatacaataatgaatagagtggtgagagagaagacatatttatctagttgctgattttaaaggaaatgttcctaaagtttcttgtaggttcttaggagaaacttccttctgtttctgttggctaggtattttattttatttttaaattgtgaatgggggttaaatttgttaaatgatttttctgcatctattgagatgattatatggtttttccttcctaatttgccaatgtggggaattacattaagattttctaatgttgactcttacttgagcttctgggataaaacctactgggtcatctcacacacattccgtatatttattgtgtgataaacatgatattttgatagatataatctcaaatatgtatattaaagaaatactatatatttgtgcacacactatactgctggaatttttgctaattttttttttcagattttttgcattgatactttaactgagattgaccaatacttgcctttttttgtattgtcttagtgtttttctacaatgtaggtttagactgaactcataaaaatacattcaggattctttgttctttttccatatttttatgtgtcaactttggtaacatatttttctaaaaggttttccattttatctgtttttagatttattgctttaaaatacagaaaagaattctcatgctttaaaatctttactctatttagttatgacccattttatgcctaatagtgtttatttgtgctctttctttttccttgctcaatcttgtcaaatatttacctattttattagtctttttaaagaatcagcctctattttgtttctattctctattgtttctgttttgattctattgatttgttgtctttattattgccttcctgctactttaaccatgtgtggaaaaaggattttcttctattgtttttgagtttacattgttgccctttctctaactttcttaaaatttttcttgtttactaatattaaattcaatgctaaacattttcttcaactgaaatttagggcttcagttgttcagtcctaaatatgttttactttcattttgatttcatattaataatttagcagtgtgcttctgaaatttcaaaatgtacttgggtttagggattgtggttttatctatctcaatttttttattgtattttggttgaagaatgtggtctgtatgataacagttctttgaaatttgttatttgttctgtggcctggaacctgttcaatttttatgaacatttcatgtgcattctctatttattgggtagagaattctcttcccatgtcattagctgaagcttgtataatgccttatttcaatattaaatcttttcccttttttaaaaaaaaaacttgagctgtcaatttcatagagatgtgtactaaaaatctcccactatatgcttctggcagatcatgtgtgttaaggaatcacaaatgtggtaaatgaaacagcatatccaaggcacccatccttgcaggaggataaagaagatcctcatggatgtgacattttagctgaacaggagtaggccaagaaattcttgcattgccatagaggaacaccggagactgggtaatttataaacaaaagaggtttaattgacttacggttctgcaggctgtacagtcatggtgccagaatctgctcagcttctaggaaagccacagggagcttttactcgtagcagaaggtgaaatgggtgcaggcacatcacatagccagagaaggagtaagagagaggagacggggaaggtgccaaacactttgaaacaactagatgtcatgagaactcactatcacaaagaagacaccaaggggatagtgctaaaccattcatgagaaatccagacccatgatccagtcacctcctccttcagcattggggattatatttcaatatgagattcggggggacaaatactcaaatatatcagttaataacagaggacttcattctaaatgcaaaggcacacaatcacaccacctaaataccactttcctgtattctattttcttgcatatttttgacattttcattgaatacctcaatttttaaaataataaattgaatacatgtaaaatgattttcttctatttttaatgtattaagttcaatagagacataaaaaataaaatataaataaataaataaataaaatctcccactataattttgaattgttactttcttgtagttaattcaatttttgctgtaaatatttgacactgcgtcatgaggcatacaaaaggattctggtgaatatatcttcatattaacaagtgatcctctttatccctcaaaatgcttttggctgtaggccgggcgtggtggctcatgcctgtaatcccagcactttgggaggcagaggcgggcagatcactcaaggtcaggagttagagaccatcctcgccaacatggcgaaaccttatctccactaaaaatacaaaaaaccagttgagcctggtggcacatgcctgtagtcccagctactcgagaggctgaggcacaagaattacttgagcccgggaggcggaggttgcagtaagcggagatcatgccactgcactccagctgggcggcagaacaagattctgtctcaaaaaaaaaaaaaaattgcttttggctgtaaagtctgttttatcagatccgttcatttattcattcactgattcaattaaaataaacatttattgaacatttattgtttttaaggaatgtcctaaacactggagatacagtagtgaacaaatgagaaagtccctactctcttggatctgagagatcttatattttatttggagatcacagataataaacaaacaaaatatataatttgtcaggtggtatagtgctataaagaaaaataaggcaaggtgaggtagataaagttatgctggggggtataaagttatgctgttctatatcatgtagtcgtgggcagctcttggattagttgacacttgagcagaggcctgaaggagccacctgatgtttatattgcttatataaactgaatgtttgtgtcccaccaaaattcatacgcagaagctccaacctctaatgtgataatatttggagatgaggcctttgggaagtaattaaagttacattctctactgtgtattccatgcttattgggtggagtgttctcttcccatgtcattaggtcagaacagcagggccctcacaatggcattagtgatcttttaagaaaaagaaggaagagatttttctttctgtatgtacacctgaggaaagaccatgtgaggacacagcaagaaggcggccatctgtaggccaaaaagagaggcctcaccagaaatgaaatcagccagcaccttgattttggacttaccagcctccagaactgtgagaagtaaacttctgctgtttaagacacctggtctgtggcattttggtatgacagcccaagctgatttgtctaatgactataccaagttcttgtgagcatttccctatggtattgctttctcttcctttatgttaatccttgtgttttaggcttctttcttgtaaagagctggagttttaaaaaatccaatctgaggttttctgtcttctaacaggttaaagtcatttatatttattatgattactcatatatttggaattcactaggagcctgaatgttttctatataccatgctacttctttacttgttttttcttcttattctgcctcacattaaattacttgactttttcttacactgttttccactgatttgtaatgtatacattttgtcctattgttttgacagttgttaccctcaaacattaaaaattatatttgagagctgggcgtggtggctaacacctgtaatcccagcactttgagaggctgaggcaggcagattgcttgagtccaggagttttgagactagcctgggcaatacggtgaaaccacgtctctaccaaaaatacaaaaaattagccaggcatggcatgcacctgtagtcccagttcaaattccttcttactgaagtacatccttgaatagctatttcattaaggatttgggaatattaaagcatctcagtctctgactgaaagtatctttaattcactcttggtcttgaataataatttttctaggtatagaattttacatagatatcttccctcagcatttgagtatattatttcattaccttttgatttgtgtaattgataaggtgtagtctgcttcaggctgtcatttatttagagggttctctctctctctctcatattgctttaaaatttttttttgtttttatctttggtgatctgcggtttcaccacaatcctgcttgggattcaagactaagaattcctgacattcaccgattctgaaaaattttgtcctagtctctgaatattttctctcctcagtcctctatttatctatctgagtcctcttttatatgtatattggaccttgttattctctttttcatgtctctgaatgtgtttttcagatttctcatgtctctcttttttgtgttctatttttttctttaacatctccctaccttttttattcctgtccctccaaggtaaccaatgttaacacttggtatgcattcttctacatgtttctccaagctcctataaacacatgcacatatatattcatatatatcttaaataagggtgttttgttactgttgtttgcaaaaaaaatccaatcatacagcatgtattttttcacaacttgtttttctctcttgatagtacatgaaggataatctccagataaatggatacaaatttaattcatttttaaaaatagctaagtaaaattccatgttatggctatattatagtttattcaaccttctccctattaatgagcattcagattgttttcagttttatgtcactgatagggacaggagacagggaaattctgggcagaagagggtgggtcccagtgagggccccaccctcaagctgaaaagcctgataccatggtccaaagggagaatttacatccctgttttcccactcgaatgttgccttttccaaaaccacccatggcctgccctgcctcccatcctgagcccataaaaaatccctggctccactggcagagagaagagaagcagctggatgttgaagactacagttggacgttggagagaagtggcttgagttcagagggacagtttgacggtgtagcttcagacaggagtttggccagggatggctggacttcaggggaagattaccttccatccccgtccccttttcagctccccttcctactgaaagccactttcattggcagtaaaatcctctgtatttaccatcttcagtttgtttgtgcgacctcatttctcctggacgccggacaagaacttgggtgccacaatgcaggtgtaaaatgctgtgtcacactgaccgcccccactgagctgttagcacttaaggcgtccatggatggcagagctaaaagagtactgtaacctgtcctcttgggcttcaggggttgcaggcactgctccagacgctgctgtggggctggtatggaattcgctccttccagcacccaaaaagcactcacctggctcctgcatctactcacctgcgtgctccacctccgtgaggggtggagtgcagcatgtcttcatgagtggagttcacccctgccagtgccagagtggctggcaagttccagcgcccatgcactccagttcccacccatgaagcgttcagggaaataatcctgcttcatcaccacaaacattgtggccataaacatccttgtgcatatttacttatgtgctggttccttaatttctgtggaagccaattcaatgccactttacttaccccagtccctattctcaaagaatataactttgtatattttagctttttcttctagcatatatatgtctctgcatttctaaataatgtatatactgttatcttttgtttcatcaattttatgtatatcttaaccttatattatagtagataaaaatttacctgtctgatatgatcatatccacagcttcctctcccctctttctcccagtgtagttatattacaatttgggggtaaatcagcccctagtgttttcactattttgtcaaaataaatggcattaacagctaaacctttaacaatgaagttaatatctgtctttttttcatgtccttaattgatctttgtacctggtacagacttttcctctatcttccataggctcacagtacctttttccacaaagctgatcacattagtaatctgtcagttctccttcttttcttggtgatatctctgctggagacctacattttccttctagctagacttctctctcggcctgctagatagctgacatcctgagatttgtcttcactgttattctagaacttccctttgccttttcttctgtgttggattctctctcttgttttaccccattgtttgaggaagcacagcctccagcagctatcagaattaaaacctggtgcagtggtaacagccttcatatgccttgctcttggtctgctggccctgtctggatgactggtcctgtggctgagccagtcatcatcctggggtatctcacttcagtgccgtcatccctctgttgtggtcctgtgttagttctcataaaactccctttacactctctcatttctgtggctcccagcttacagtagcctatggaaaatggatccctgagagacacattcacacttcacatgtctgaaattgtcttcattctgttgtgtcacatgatgacttgtctgtcttgtacgggaaaatccaggttaaaaaacagttttccccagaagtttgaagatattgctttattgcacgcaatctcccaatgttgctatcagaaagctgccactgttctgattcttgatgttctgtgccttaccttatttttcttttcccctggaacctctgatttttcctgtccccctatattctaaatttcacgatgactgttctaattgtgggtctgttttcacctgttgtactcagtgatcattgtggtctttcaatctgtcaagactgtgttctctctgtaagctgctctttctttccagaacttctattatttgggagttgaacttcctggacagttttgtgattttttcatattttctcacctgttttccatctctttatcttttttcactctttttgtacaatttctttaacttcaatttccaacccatctattgggttcatttctgttaccgtcttaagtttcctcttttcatctataaatagttttttaagcattctgttctgttttcaggatgtgtgtcattctcttagttttctgcatttttttttcttttcagaaattgtctttgcctctcctggtctctgtctcctccatgttgtctttttcagtctgtttgttttgaactctgtctttcctgtagagactttccttgcatgtcgggcagtcctgattgtctgaccatatttaagaatgaataacagatgtattgaaagctctgaggatgcgtgagggacttgtcaactctgagcatcactgtagaataaaatgtttctgtcataggttggagaactcctaatgctaacaactcctaaagtctcctaatgggaaaaccagggaatggtcagattctccagagaacactcttccagactcctggctgcaagatgccgccctgcctgtcccaggctgggagctgagatgaggaatgagactggagggttcagccttcagcatgcatatttccttttatttgatgtgtggcatctcccaattccaaaatcctctcccagagttcaaacctccagtattagcagttgtgataaaggctgctgcctagcagggtggattcaaggaaaggatccagggatctaactgattcttaaacagtttccctcacattcttctttatttattttttttttttgaaacggagtcttgctctgtcgcccaggctggagtgcagtgacgccatcttggctcactgcaagctccgcctcccgggttcacaccatgctcctgcctcagcctcccaagtagctgggactacaggtgcccgccaccacgcccggctaactttttctatttttagtagagacggggtttcacctgttagccaggatggtctcaatctcctgacctcgtgatccgcccacgttggcctcccaaagtgctgggattacaggcgtgagccaccacgccctgccctgttcttcttattttagtgactcatctcccttccgcacagttccagaggtcaccggtgctatctgttcctgagcctttggaggatccactggttgttcctaactttcctgctcctcactgaggattcagcttcctttgtctgttaattctatcactgcttctccatctgctttccgtcttctaaaatcttattactgttatttctaaaatcttgttacttgttaaacctacaacatactaaacaatcctggaattggttgtaaaagggtcatggattgccagagatcaaaaggtatttaaaatctcctctcctattgtcctggtggttttatgtcttttaaaaggtcatcttccctcgttacagtgacgtttcaggtgaaagccatattagatacagtgtgttcaattctccatttttgcttggaagtcctgtgttacattttggtttaattttctcaaggctgtcttccggttcactgatggcctgttttgtgttactctactgtctaacctttccattgagtgattactaggagttctactttattttttcaaatctgcttattctctttttttcatgtaatcctaattttctccttatggcttttagtctttatcactataatatttttaaacaatcttattttgtactccatttgagattgtatctttccagttcttaggatttaaagttttttttttccctttatcactgtccctcatggcagtttatttgtgtgtgtgttggggggtgatactggcagttcaacctcagatatttttccttttctttgtttcttttttctttctttctttcttttttctttttctttttttttttttttgaggtggagtctcacttagttgcccaggctggagtgcagtggtgcgatctcggctcactgaaacctctgcctcccaagttcagatattactcctgcctcagtctccctagtagctgagactacaggcatatgccagtatgcctggctaatttttgtattgaaatgggatttagccttgttggccaggctagttttgaactcctgacctcaagtgatctgcctgcctcagcctccaaaagtgctgggattacaggcatgtgctgccatgcccggcctcttttctataggaatcttgtgagtcctgagttgtgaaatcgtttctacatagtggacatatgtttgtcttttctggagatctaaggactttcaatgatcctagaactgtgtttgtattaatttattgtcatgggattcccctactcagatacacaggtagtataaattccgatcttacaactgaaagtggttcatgcttaaggttctgatttcccaaaggtgtcctgagctagggatacaagggaatgttctgctctttatctctgaggcagtgggcagagtgctttagtccaccttttcatggttagggtgactttttgaggctttgagatttaggaaaggggctcagttctggccccgctacctcatgcaagaccaaggtcatgtccctgcatgggcattagaatctcaccactattcccagggcttcgggagcatttgcgagagtctgaaacttccttgagcactgtgtagtcagccttacataaaagctctggcttcaattttatctttatttctggggcctctgtttctctcccttcctctatcccccttttccttccttttttccctttttttcccccaaacttaactctgtgatattttcttgggaatttcacatccttgtagtgggaagggacccatatgattaacctgttgtttgccattttgctgaaaatgaacactcacatctaattttgtgttaaacctggaacatactaaacaaacctggaattggttgtaaagggtcatgggttgccagagatcaaaaggcatttaaagatccgttgtccaaccctagcattttacttaaggaaactgagcctcaacactgataaaaccacttgcccacagacacgtggccagttagtggaaaaggtgggactgacctcaaagagtggtcacttttatctcacagcatcacaaggaggaacatctgacagcacttgccaggttatcaagacaccaagatccaatgcttgttgagccttaagtcactgagacattttggaaaagccacatataccatttgtgtttgtcttgacttgctgttgtgtttttctcttcttgaatacagagtagtaatgcttgttgaattatttaagtggcttattgctgtgccagtttgtttgtttttctacctttattttttcaaagaaaaacgcctttttttttttctccttgaagacatctttcaggatccatcacctaccggaaaccttccctgaagtctgaagctcttagagggtttttcaccttttctagctccttttgaaattgtcatttgaaccatgtcattagcaccatatgatgaattcatctgatcctctttaattgttgaatatgtatgtgcttcatctccccaagattgtaagtgctagcttgcagaaaccatggcttatatatctttaccattttccaaagtgttttcctgtggatgagttgatgacgaaaaacctagaggaaatatgttcttttagatagagcctgagtttggtgtcaggaagcctggattctgccccatttctctgctccctggtagacctatgcaaaccaccgatgttgtatggagaaactactggtgtctgacaatagcactgatacagtggttgtaaaatttttcatgcaagctgggacagttttcagagtgaaagggggcaatggtaataattgtgcagggacaacaggtataaattgggactttccctaacatgctgggacagacggtcaacttatgttctagatcaccttgagctcgtcagaactatttgcacagctgctcttgataccagtctttcaaacaaaaaattatcatcccttacaaaagttttcatccacgagcccaactttacaggtaataaaatttttagtttttccagacattcttgttttttcagctacttccatggctccaaatgcgcattataactgaagttaaactagattgtagatttgaagattagtactgctgagtaacaaatgccttcattcttctttatcaaccactctgtcttctggaaggaaataaaggccccgatttctggagttctgagcctacttttcttgggtgcattttgaaacatacggattttaccgctagtatattcagtgaggaaggaaggcttctgaaggattgatgatccccaaactggattatgtgttcatgataatggtgtatttggtggcctagcatagtgaggtgaggtaggtctttaaaatggctcattataaacatcattgttcctgagctcacttgcccttgcatctcctgccagagtgctttgtacatagtaggccctcatcaatgcttgtagattttaaattcggaggcacacttggaagacaatggtggctggtaaattaattatcagggttagcaacttcatttctgcttacgcttaaaaagtgctgcgtgaggaggctgagacaggagaattgcttgaaccagggaggcagaggttgcagtgagctgagattgtgccactgtgttctaccctgggcgacagagcgagaatccgtctcaaaaaaaaaaaaaaaaaaaaaaagttctgctgtggttgatacatggtgttggaatgcaaagaaaaatagagaagatccctgccctccagaactttgtgacctagaggcaactttagaaccataagccactaaaatttagaaagttcaggagaaaggacaatcacttttgacttggaggaatgaggtagcacttgagctaggtttgaaaaataagatttttctctaggactgaggtgagagaaggctgttccacatggtaggaacagcacaaacaaaaacctgcaagagtaaaattgcaagccatatttggagaatcagaaaaagcctggtatgttcagaagataagatttaatgatgttggtttggggaagttagaagtcctttaatgtcaaatgatggaactcaggttatgttatatagaaaatggagtcacataaagtgttggatgagtgcagtgatatcaaccaactcatgctttagaatgagaacctggttgcagggagaccagttaagaagaggcttaggtgttcaggagagatataaaggcaggagaagaaaaaggagccagaaatgagattcagaattggcagttgattgaaggaagggccaaggtggagagaacaaccaaacacaatcccaagggacagagtggatggggatgagtggagggggatgagtagatggggatgagtggaggatggggatgagtagagggggatgagtggaggatggagatgagtggaggatggggaggagtggaggatggggatgagtggagaatgggatgagtggaggatggggatgactggaggatggggatgagtggaggatgggatgagtggatgggatgagtggagggggatgagtggatggtggtggagagacacagagaggatcagaatttgattggccaagactctggatttccagggaggttgtggagagataagatgaaatagtatgtgaaagaactttgaacaatgctttgcataaaggagatattcaatgaacattaaattgaaagaaaaagggaaggaacgaaagaaaaaaaagaaagggaagaaggagcttttcccttctctctacctctctgctgtgccccagtagggagagacattgagggttttaggagatctggtgggcatttttcctgggctgttcctaccaatagacttgctgctggtttcatgttagttaggtggcacaccaagaggggactcagaaagaacagaagatcagaacttgctggtgtcagacagaaaagacatgagcttgagccacatttgaagaaagaaagagaattgggttgatgaaaaggccatactgagaattatgggagtagaagttgtgaaggcaagaaggaagacggaagaaaacacaccaccgatgcagagaaagagaaggatgctgactgaccttggaggcagtttctgcatgttctggggcctatctttctatccttccctctatccctcccttccttccttttttccattcttctatttttctgaactcaactctgtgacattttcttgggaatttcacatcttcgtagtacaaggaacccataggactaacctattgtttgccattttgcttaaagtgaacactcaacgtctaattttgtgttaaacctagaacgtagtaaacaaaacctggaattgattgtaaagggtcatggattgccagagatcaaaaggtttctaaagatcactttgtctaaccttagcattttacttaaggaaactgaggctcaacactgataaagccatttgcccacagacacgtggccagttagtggaaaagctgggactgaactcaaaggatggtcactcttatttcacaacatcataaggaggaggcctgtcatttggcggtcagcacttgccaggttgtcaagacaagatttgatgcttttgggaaatgtgggtgaactattggggatcattggaaggagaacgttgcttaccttctgaccagcctatcctgaaactctgttaggaaaaccctactactctatgaaaacaaacccagtttctcctcatttttttcctgaccattgggaataacagcaagacagtccttttagtgattagaaaccaagtcacattgactttttctgacaagccactccaggataactctcaataaattattttattggaagtactggctggtactttgccttacagaatgcctttcggtttctttgtcttgggctttgattatttggtaaacatttcagtttcatgatgacgtggtgtttagatggcaatgcatgaattgcattactaaaattgtttgccttcagttatattacatctgcttcaggaatgctagagaacataaacacagtttatttactaaactacctcagttggagcatctgagagagagaaagcataaaatctggtggttggcatggcgtctcatctcgagtcagagaatcttgaagctgggaggttcttttggaagcctcctgctgccgccttcttcaacgtgatgccaccatcctccccctgaatgtgtctaacaaaaggcagttctcagaatgtgccaactgttagaagaaggaaaaccacaattgaatagaaacttttaaattaatttatcctaacatggatcgtagatttgttatgttgactgcactgcaaaacgaatcaagccagaatcacattggaatctttttttggtgtgcaaaatcccagtgtttctttgaggcagtgctttcagtggtgcacgtctctcctgtgcagaggaaggctctttacatcatcttagcacagtgtcttccacttctgtggtttctatcacttctattgccttttcccttggtattgtacctttccttgatatgggttccaagatgtagctgtacttaaagacttgatggtaaaaataggccagtctctaaagcaattacagttctctgtaatttttggatcctatcaaccagctttgacatttggttgaatgtgtttttgcagacatcagtgtaaactttacagagggccactgagccttagcagttcttcctaagcaaagtttcactcattctttttttttttttttttagaaaacatttaaggcctcctatgttcctttcagtgttcgctgtttcttctttatctggggtccttactgactcaccttgacgttactgattcataaatggattttcatttcttttgctgggggtcagcactttgatgattatccacttccacttccactgtgttattttttacataatatttttgttctggttacaaaagcaagatagaatttttgcagaaaaatccggaaaatagagaaaagcaaacagaagaaaaaaaaatcactcataacccaccaccaaaaacaaacaaacaaacaaaaccacagccctattgttaatatgttgataggctcctgtctttgcctagcacttagaaccctcctagtcaggttctaaattaactttacaacctcatctccctgcttgcacctcctctggggacatacattgcctggcataagacttttcatatttctctctcaatgaattttttctgattatgtaaataattcatgtggttgtacatatttccaatagtacctataaggaaaataaagtaaaaattatttttaaaaacatttcaccttattaaaaaaaatctcaccaccctgaaataaaagccattgatattttggggaccatctcaccaccatgtgtttatgtcacctccacacacatgatttcccataaatgagataggagcacccatgcggttcttatcatggacacttgctttcatttttcacttatttacttttttcctctcattcccttccctccttccactctaattcctctcttctagattgccagtggcatcagccttgtctgtgtccttccatactttatgcttctacaatcttaccaaatgttttgtagtcacaaatatatgttgtgattgttttttatacaaatcagatcatatcatatgtccctttatgcatctttctttttctcatttaacagtgatagattgctgaaatccctcttttgttttttcatgactgcgtactattccttgattgactgtagcatgaattattgaatgtagctatgacaaataatactgtaataaacatttctgtgcttacaggacgtgagatgacttgattaagaaaagaatagatttttagattggaatagacatttccagattgctttctaaatggcatggtgattcgtatttctaccagcaagtctttctgtatcttgccaagggacgatgcctctaaattgcaagaaagggtgggatgccttgtccatttgaaatccaaaacatcaagacaaatatggggcaataatatgaccatcacaataatatatataaaagagaattcattaagggatgattatcgctttctagagttgggttctggggaagtattatttatagaaatgagccttaggaggccaggcacactggctcacgtctgtaatcccagcattttgggaggcagaggcaggtgggtcacttgaggtcaggagtttgagaccagcctggccaacatggtgaaaccccatttactaaaaatacaaaaattagctgggcatggtggcacatgcctgtagtcccagctacttggggggctgaggcatgagaaacacttgaaaccaggaggcggaggttgcagtgagccaagatcgtgccactccactccagcctgggtgacagagtgagcgtatgtctcaaaaatagataaataaataaataaataaataaaaaagaaaagaaatgagccttagggcccgaaatgtaattttatttttagcatgatttttttttttattacccgacagtttttgattagtgtggcagctagaaatttccctcctggtttaatttgcttctttatagtttttgtcaaaagctcaaatggtacaacacatcacaggtgacttttcaacatttgagtcaaccttgaaaatacacagatggatggatgtcagggtgagacctgacttcaagttcccatgaatgtggtttatattttaaacactttaaaaataactgtgtatgtcgtggtgtcaggagtcaggcaggtggaagggttaggccttccaggccatcttccgagctgcaccggacgtttgtctcacctcccctacagagatggtggcacagtccaatcccttttccctcctcactgggtgtcctcctccaattcatggattgtctgacactttctgcactcgtccctgctgctggtgtctgctggcacttcctgtccttcttgcttcccatcttccttgtctgttctgcccctctcccttccatttctcccgtatttcttagctttatcacaaaaaggcttgggcatcacagccatggcccactcttgagattgcatttcttggccagcaagcccacctggcctcatcattttggctgcaacttcaaggtcatcagcccatcttagctctgttcatccctaagttttctgtggataggctttctatttgacagagtgcttctcccagccccctcttaatttctttatctgacactgttttttgggacctagaggtccctgagggcctggggcttccttgtgcgttgaggtgggccctgtagattctgccgtcgagagaactctgaccagcccgctctgagaaagaatgtcaagtggtcagggtctcaccaagcaaagggcctctatatgataatggtccacagagctgtcaggagaacaaatggggtaatctggagtgtgatttcatcattcttcagtgcattctcagtgccgggaaaagtcatgagtagggttctcgttttaactcctaaattatgaacttactcacatttgtggattagacaatgcctcaacatcattttcatagtgtgtgtgtgtgtgtgtgtgtgtgtgtgtgtttatgtgtgtgtgtgtgtgtggtttaatgtgtacaactcatctgaacccagttgctctgtggtttatcttttactgagaactgctttttttcttccttttctaagaaaatactagttcttaaagtatgaagtctttcttgtgagttcatcagcagtgaggggtgtggtgtgaggacctacattggtgataatgagatccaacaatcactgaattcaggcgattttgacacaaatcatattgactaaaataatattaagcacgtgatgctggtgacatttgaatatttgccaggaagaatacctgcatggtaacaattggctgcaaatggaagagatttgcatgttttattgtttttacagttttaacatacatttttattggagaatctgaaaccaacctatgtaggggaggttatgggagcaaaagtaacacagagaaccagcaggaatcggcctacctgcctgcctctgtcctcctctgctcctaagaatttgggtcacctctggcttcagcacttagtcctaatcatgaacaacacatgagttaggggaaaggtgtattcacaaatttgaaatttctttatgtttttcctctctcacattcctttcctgcagtctctttcctactttttcatcctttgtgtaaaggtagcaactttttttttgttttttgagacagagtctcgctccgttgcccaggctggagtgcagcagtgtgatctcggctcactgcaacctccgccttctgggttcaagtgattctcctgcctcagcctcctgagtaactgggactacaggcatgtgccactgtgactggctaattttttatatttttagtagagacaggatttcaccatgttggccaggctgctctcgaactcctgacctcgtgatccgcccgcctggatctcccaaagtgctgggattacagttgtgagccaccgcacccggccaaggtagcaacttttatttgagaaagcttggaatcctgacctaagctccctgagttcccactgtggcttgtggccacctattgtgatactcactctctacccttggttttctgatctctaaaatgagactgtctacttcacgtggctgttaaatgcatcataatttccttccttacctcccttctttaaaggaaacttggaattttcaaagctactaaatggagtttttttgtgttttttttgttgttgttgtttgtttgtttgtttgagacagagtctcgctctgtcgcccaggctggagtgcagtggcatgctcttggctcactgcaacctctgcctcctgggttcaagcaattctgtctcgcctcagcctcccgagtagctgggactacaggcgcccgccaccacgcccagctaatttttgtatttttagtagagacggggtttcaccatgttggccaggatggtctcgaactcctgaccttgtgatccacctgcctcagcctcccaaagtgctgggattacaggcgtgagccaccacacctgacctaaatggagtatttttagggccacatggttaggggcaactaaaaatgtcatatgctaccattgcattcatgaacaccatcctccctcagagaagaaaggagtcacatgactgcatttctggcgaaacctgattgcattttggtaaaacctgtgccaggaccaggacagtcatcaatgacgtgttccctgattttcatgactgaagagcttcaggctggtgctgccgcaggggacctttgcgtggcatggctcctctgcactggcgttagctgtggtgagacacagcttgcagccacagtaggacaatgccaagtccaatggtatttgctgttcaggagcaaaagaactacacagcaacaacacatactatcgtcgagtacctatttatttcactgtatgtgtctgaaggactaaatcgaagccagagccccccgcccatgcaccaaaataaaatgcagacagtgttgagttaccaaaatgacagtgcacctgcaaagggaagtcagtgaaggtttaaaggtgaagacttaaaaatatatagatagcttaaaactgcaaataaaaaaatgtcacatagagattttcatgagcttagaaaaccaggaggagatttgagtcgagagaaaacaaggccagcctctctcaagtggcagatttctgcagtctttggaaagatggaaataaatatggccaggcgcggtgggtcacacctggaatcccagcaccttgggaggctgagacaggcaggtcacttgaggtcaggagtttgagaccagcctggccaacatagtgaaatcccgtctctactgaaaatacaaaaattagctgggtgtggtgatgcccacctgtagtcccagctactcgggagaatcgctggaacccaggaggtggtggttgcagtgagccaagatcgcaccactgcactccagcctgggtgacagagtgagactctgtctcaaaaaaaaaaaaaaaaaaaaaaaaagaaatgaaaagaaaaagatgggaagaaataaaagctgcaaaaggacaaatggacagattcagggcggaaagcaaggacagagcaggatttgagcgtgagacttgctatttgggcttaggtgaaatgaaataaagaaaagggctggagaagtcagaagtgggtcacagaacaatgagatggtgaatggggtccaaagtgtgggtcgccaggactgccaggaggagccacatctccagggtagggctaagctgcaagcaaccagcattatttagcagagtcctgcagaagtgaatggaaagatctttaaaaaacctatgaatggcagtggaaaaaaaagaactgaaaggaaagcagaaggcttatgggctagataaactcattctcagacatatgactgaactgaaactcagataaaatattatcttttcatccagcgtctttcattcgttagaagttcagtttctttatatttcattcatacaagagcaatgcagatttttaaattaatatatgtgctcatagacatgtggatagaaactcattgctgattagaatattatgaattaaggaaattttaacaaaatatacttggaaagtataatatgggattgaaatttgaagccaatgataagattataaagactcagagctaatctttcatgcactattttgtaaagaataaaatattattcttccttgggcctgaagtccacactagccccctcactaagatgataaccacaggggtgagccctgagatcttccacccccaaggcctccactaatcgccatctggacatttgcttttcgtcccttgtactgcctgttctccacctgaacagtccagacacttccagcatgttcactgcccacaagtttacttaggaccccgaagtcctagaaaaaagttgcctttagcttggctgctcctttggtctgcactgtgtctcctccccatgtctttagcttcctcaagctggatggtttcttcctgactgcacagcttcactcccaactgtccctactgccaccctccaccacaccaggggctcttcttttcccaggtttttaaggaaacactgtctttgaggggatcatgcaccaatttcagcaggtgtctggagccataacattttactttcctgtagcagttggaaagatctctctttaaacactagaccctcttgatcctgttaaacggcctgattcttccttctgtcttggtgaccagtcatctctgtccaacatgccagcttctctgtcttcccccactcaggtaaattcagacatttgccccagcctaggtcttagcttcctcgctctgtttcctctgtctcggagatctcacctactctctctaatccttccaattttaatgcaggttgttccaaaacccatatctccaggcctgacacgtctcccatttccatcctgtatgtccatgccaccttggagaatcccccaccatttcaaaccaagctctgcctctccctccgccactaacagtgtattgggtacagtgtattgggttgaggatttatacacttctccctagcattgccagttaggagaccacctgccaatgggaaccactagtcctggctccccacatcttagtcatcttcagttccatcatctcactttctttgtatccgtacacagactaacacttcatttcccccacttccaaccctgtcctcatggcgttcctagaaatgacataggcggacatctactaaacccttacttggtctgtataagtggaggagttctaggtgaagggaacaaaagcccaacttgcaccctgaaaacagagagtcacggcccctcgatcaattcacacacttgcaccaatttaccgacccagaagcccttgaatgaagaggaggccgggtctccttgacgaaggaccctaccacactgtcaagaattaatactgttgctttttctcccagccttccccaaagggacctatagccttttgccagggtgactgtgcactggggaaaaggaattaatcagaccttttggggactactggtgactggctctgagctgacactaattccaggagaccccaaacatcactgtggtccagcagtcagagcagtggcacgtggaggtcaggtgatctctggagttttcacttcatgtttgtgtccatccccatagcactttgttcaggacaacgtggcagggcccacactgctgcagtggattcctggaggcttgtacctcccaacccccaacccagagctgcctacagccacagtattattcagtccaaagcacctctgtgacaattatattcctggctctaaacttccactggtgcccagttgttaggaacaatgcagctttccttagcccgatagttaaaacccttcacaaagtctccttcccctttatttccagttttcctggctataaatcctcaacccaatacactgtaccccactccccccagcccccagatacaccatcccccaacacgaaacacttaccctcttctcagctttgcctttatccacgctgttccctctgcctggtatttccttttggctcctttctctggatttgtgtggtgcctgttttagcacaaatataccatgtccccttgtaaaatgtcttttcttcacttcagctggtaacagccagggaaatgagcaaaaacgtgtggatagattaattcaccagcatcggggagccgggtgggcgggggtggggggtacagtgtggcgcagggcatgtctttctgtgggtaggtcgttaacaattttcataaacaaaagattgccttgtttatacctgttcatcagagtcagcatttcttaaatctgtttaaggtgaaagtgagtgctttgtgttttaaaaatcatatgggaagcacagaaataggaaatgttcactttgtttaatgtggaagtatattccataacaggtggcctctcaacttgcacaaataaaacaaaattggttggctaaaatctatcagagaagaagaggaagtaatcgccaggtggtaggaccaggagcagatggggactatttacttagatcctcaattcttcttgttgagtgtccctctaattaagtacctttccttagatgttaaataaactttcatatttttaaatagtattttttttagaaaagtgtattcccatgccagtttctccttcttccaaagtcaggggtagaataaccatatagcattaatagagtctgtgtaagcttaaatagtccaactttcctttcaggctttttatttgaagtttccaaattacacagctaaaataaaaacagcacagaatttaaattgagaccattatatatcgcagggacttcccccacccccatattaagtaaggcagtgtcagccctggtggtccgtgcagactcagtgcactggaggcagaagttccaggtggactgactcctgcccccacccagacctctggtgctcccaggcagtctggaacaatcagactctggtgctcccaggcagtctggaacaatcagactctggtgctcccaggcagtctggaacaatcagagttgcccttggtcttccggaaatactgtaattccctgtgcaatgttagctcttgaccatctttgaattctttttcttagacttacaaggctctgtcgctggtttccctctcactcttctgacgactacatttcaacttccttcaacaaacacttatgaagcatttatatagcacttactgacggccacagccaggtgcagttttgtggatctgtacacaaatgaattagatgagccggtgcccatcggccctggggttcacagaccaaggctcgctctgccggcatcctgggctccctcctgccgcctgcacctggaacgcttggcggtctccgtgcctcttctccagttctctcctccactgtgctcctttggaaaggcttttctgtcacggcttcaatcataaaactgtattcctagtcctatttcctcatctgaggtgaagcatgaaatctcctcttgtttaccccgaattcagccagctcaccacgagccctctctgcatctgtcagcctctgtcagcagctgtaaaagcttcccttctccccagacccccacatctggaaaccgtctttaagtcgtcctcccctttttactgtgtgtccaggaatccacttttgggcttcctctgaccggcctcttccttccttcttttcctcctccccgccccactgcctccacctactctagtcccaaggccgtgcccctgccccaaccctcccactgtgctcttcccacccacaccagagtccccttctttaaatcctgtccgatcagtgtcactctcattaagtgacagagatgatgtctccaccttttatatctccaacagcatctaacccaacacctggcacttactagaggcatcaacgatgcttgttgttctgtgtggcgaaggcacacctggattctggatggtcagtctcagctctccatctttgctgcctcacagggactccaaatgtggagcgtctcccactgcccttaattagggaaattcagcctcgcagaagacagtgaaactgatgaaagcattgggaaatggaacctaggaaagttaaagaattggcatcatttgatgtgagaaagagaagcgaagatgatgagagatcctagggaaaaggctacatgccctgtctttcttgagacaagcgtgtgcacttcctttgcttccactcttacttgtgtttatccttggagggacctttaattatctaacgcttgggtattggccacggtgcttatcgtctgcgtgtgaatctggacatggtccccaagctgtgtggtgctgtttgttggtgcggtccaggatgcacagggctgagatggtgctgcatgcacacttaccgagcacatccccctgggagaggtgtggacaccaccgtgaagggggcccagacctcctccttaaatgcctgcactttcacagggatcagacatggagacaagaactctcagaagagggagaggcctgaggcacagcaggaaggtacaagttcaaaggaagtgaagatttccagtgagagctatcagactcttgaaatggactacagggaaagcctgtggtctcctctttcttagaaatgctaaactcataacagaaaacctctccaccgtggcttgagtgtcaaattctctggaggcctggggatggggccgggagttttctgcctctatatccccatggtccacttattcgggtggcttagtttgctttgcaagcagggggtgggagcggggctgcttattccaaccacagtagtcaaatgtgttacttatgagaaataataaaagatccttcttcttttctttttctagaccccctctagtcaaatgttgttgtttttttaaatagaggaggttgttttgcatttttcttttcgtagtgttcgaatttagcttttgtatatactctccccagtagttcagagtacattcatgagcccagatcatgaggaatgctcaccattttcctgaaagatggtgtgtggaggatgtgtacagatagaagctaggctgttgaagattttattgaactcatcagcattaacaacagacactgttagtgaggtccgaatgtttttgtttatttttttgactcaacaaacagttattgagcaaggctttcttctgtgcccggcaagatgcttgccacttgctgaagagacaaagatgcatgagatatggtccctgcttttaaagcacttacaatctagcagggaagacagccaggtgtacaaataatcatatgtgttacaaagaaacgattattccggttcaaaggaaggctgttgttgatgaaggatggttgcatagcagaattataatcgtcagtttgaaattcaactttttcaagctttgtcatttctatcttgtattagccttatttttccctttttcaaaatacttatttgcataggtattagtcacatggttcctatactggaacagtttagaaaggtgtttattggaaagtctcgctagcacctccgtccccatccacccaattcactactcgctcttccatcagaataaggaaccattgtctattaatttcttgagtatatatccagcgcccatccatgcaaaataacatatacacattttaaaattttccctttcttacacaaaaggcagcttactgtttgccctgttaatttaacagtatatcttgagattttaccatgtaagatcttatcatggtacatcttgagatgtaccatgtcagtacatagaatgcatgcttttcctttcttcctaggtagtataatacttcctagtattgcatcgttttggagatatcagagtgtgccagttatcaattagctgcataacagattactccataacatagtggtttaaaacaacaacccttttattagtcataattctatgggtgaactatttggcctgagatctgccaagggttttttactgctgcttttgcctggatttgttcatatggatgtgattatttggggctagatggtctaagatggcctcactagcaggttgttgggagagtctgacctcagttggaatatgtgccttgagtaaaccagccccagctgcttcatatggcgactgggtcccacaaaaacagagaggggttggccccgctgtggaggttttattaagcttctacttgaatcccattggttaatgttccattggcaaaagcaggtcatggggccaagcccagagtcaatgtggaagcaatttcaggatgagaaattcattagatgtcattatgtaactatttactacccatggagtaattaaccagcccctgatgatggacacctgtttatttccagtcttttggtattgcagataatgctccaatagataatcttgtatattagtcagttcatatgtgagcagggtaagtaccagaagtagtactgaccctgtgctggatagagggcagatgccttctcaattatctatctatcctatttctgtggtgctgtttctctagatattttaagcttgtgtttttctgtcactcgtgcaggagctttgaaaatgtgaaaagactttagataggaaatgcatataaactgaattaattagaaactcactcctaaaataacaaaaaacatgaaagctagaatagaaatcaaataattttgagtaaagtaatgtgtacattatttgaagaaatacaagtatgtctgttataacaatactttacatttctgttgtgtttacagcatagaaacacttagtttgcttttagtatctcaattctcagaacaattctatgagttgaaagtataattggccccattatgtgtgtgtatgtgtgtgtgtgtgtgcgtgtgcatatgtatgaatgtatttaaaggcttagagaagttacctaacttgccccaactaacaagtaatagccagaatatatacccagccctgtgacaataaacttgacgttgtcccattaatcgcatcttactagtagggacttgtatcttgtatctggcttagcttctaaagatatacatgtgctcaacttgctaattgctttgctagtacaatcacaatcatatatgatatcacctcaggaggctctttttaaaaatatataagtagttaatttctaatttctgaataggtggggaacctccctgaagttttctcttgttttacacatgtcattggcatccaggttgagagctccatctcctgatcatagcctctagtaaatcttgacggaggaattctctttaagcccagggtcttgctttcagacttcagaaaagaggagtttttttaaataaaaccttgtctggccctcccgcaatggatgcagaaggtagactgttttctttcttttaattcacactcagacgttttcgtaaggggcttggtcctggcaaagtgggcctcacatacaaaccacccactttcctgaagcgtgattgattagcaaagctgttctgctcaagggcagcctgttttccccagcctggatgctgacaggtccgacatgcacagattttcaagcaggtcgccagtccccaggctgcaggctgtaggccaggacgcttgttcttgagggagaagagaggagaagaaatccactccgggggcaagaattaagctatattatagaattcccaagacacagcagggcaggccaacatagtccttgtttagagagcccctgatggtgttgggtgccaagaaaaccatggctgcacaagacacacagagtgaaggtgaatataaagatgtttaggcaaagcctgtgcatatggtactgatccccatttgtctaagaacctctaaacatcaaagagagttaaagaaagatagaaatttgatgcctaatcaaagtagcctatgatggaagtttggaaatacagccaagcaataatactgtaaacagaacgaggtacagatcatgtctttgcatgtttgtctctgtggcatctaacagcgtgtcttttacaagtagaatctgcataaatatatagtcacaaaatgttagagctgaaaattatcttacaaaccgtcttgtccaggcctcaccattttaggaatgagttaacagaggtacagacaggttaggtaagtggcctcagttgttctgagtcagaccaggtcttctaaatcttagtgaagtagttgtcataaaattgtgctgccagtattctaacaaatgttatgtgaatgtaggaatattttattttttttgagactgagtcttgctctgtcgcccaggctggagtgcagtggcccgatctcgtctcactgcaacctccgcctcctgagttcaagtgattctcctgcctcaggcacccaagtacctgggattacaggcatgcaccaccatgcctggctaatttttgtatttttagtagagacagggtttcaccatgttcgccaggctggtcagaaactcctgacctcaagtgatccgcctgcttcggcctctccaagtgctgggattacaggcatgagacactgtgcccagccaaaggaatacatttatttcctttttttcattgtagaatttattattattattatactttaatttctggggtacatgtgcagaacgtgcaggcttcttacataggtatacacgtgccatggtggtttgctgcactcatcaccctgtcacatacattaggtatttctcctaatgctatccctcccctagacccccaccccctaacaggccccagtgtgtgatgttctcctccctaggttcatgttgttctcattgttcaactcctacttacgagtgagaacatgtggtgttaggttttctgttcttgtgatagtttgctgagaatgatggtttccagtttcattcatgttcctgcaaaggacatgaactcatccttttttagagctgcatagtattccatggtgtatatgtgccacagtttctttatccagtctattattgatggacatttgggttggttccaagtcgtcgctattgtgaatagtgccacaacaaacatacatgtgcataaatccttctactatgaagacacatttatttcctttttaaagagatttatttaagagtcactgattccgtaaaatcatggaaagtcatctccttaatttacttatgtattaaccaaaggagattcccccaaggtactttctattaggggcggtgggaaaagggagggttataaggatgaattgactagcgtcttttgaaagactttcaggaatttgggtcttaagacattttggccatcttacagaaagtcttaaatgtcagaattgggtgaaaaaaatttaacttttctcacaatggtttgttatatgctcaaggtgcagatagcttggtagggacaattcagcctgcggttaagagtggtctctatgtgtacgtcagtaaactggctatcagcgtagcagcaggagcagaaatcatcaagaccgtggaccccccagcctgtcacttgacttctgctccgtaatgctgcctgcacattgcccatttggtgcaggttatgcctggcttgtttcaaacatcccgtgcctgctggagctgaggatgcagcggattcattagctccataggaatggaccccttcattcaaagctcaatttggcccaggcgcagtggctcatgcctgtatctcagcactttggaaggctgaggtgggaggatcacttgagcccaggagttcaagaccagcctaggcaacctagcgagaccccatctctataaaaatattaaaaaattaaccaggcgtgtcccagctatttgggaaactgaggtgggagaatcactttttcccaggagttgatgagttttctcccacccgtgttgagctatgttgcaccattgcactccagcctgagtgatagagcaagaccctggctctaaaagaaaacaaaacaaaaaataaagcttgatttgttttcccatcccatggcccactgccaactctatcatttttggctcttgactgtcttatacgcgggagtgtagggagaaacttttgccagtcccttcaaagatggctttgacaatctgttgtcctgaataaatttgaacacctgacaaaagagtgtctagaatcttcctttcctttacaaagtgtaaggggtcagatgtattgccccttttgggatataaatcagttattgttctgccagccactgggaacattttagaagcccatttattactatctgcaatggtacctcatatttggtttcctgtgtcataaagaaaaacctgcaaatacctaaaagtaaggattccagtgaaatgtgggttctgcttcactctgtttggtgtgggaggctgtgtaagtctaactctaagaataccggtagtggtatctatcttcattctaagaactgagggaggcgaggtttgtgcagaattaaatcaccctgtcatatctgtgagggcttcctgcagaacgaaggcaagtaaacccaaacaaacaaaacaggaacatgttggaaacagtcagaggtatacgtctggaactaaggttacgagctgagccttgaaaagttcatgagagactggcttgcttgaaaatatccttcgtgtgtgtgtgtgtgcgtgtgtgtgtgtgcatgtgtgcgcgttgttttgtttgttacggttttggtccgtgctaccgtatttaccccatgtgtggtggttggaaatgtcagggtttcttgattgaaaaaggaaataagagattatgccactcacagcacagaagtgggatgagcctcactatggtgtatacgtgtgcgtctgtgtgtttatgtctgtgtcatctccatgtgtttctgtgccagtgtctgtgtgtctgtgcatatgtagtgtgtctgcgtgtctgtacctgtgtgtatgtctgtgtacatgtgtctgcgtgtatgtgtgtgtctctgtgtatgtgtctgtgcatgtgttgtatgtgtgtctatgttgtgtctgtatctgtgtgtgtgttgtgtggtatctgtgtgtgtgggtctgtgcatgtgtctgtgtgttgtgtgtgtctctgtgtctgtgtatgcatgtgtctctgtgtgtgttgtctatgtgcatttgtctgcgtgtgtctctgtgtatgtgcctatgttgtgtagtgtttgtatgtttatggctgtgtgtgttgtgtgtgtctatgcatgtctgtgtgtgttgtgtgtgtctctgtgtctgtgtgcctgtgtgtcttgtgtgtgcatgttgtgtagtatatgtgtgtgtctctgtgtctgtgcatgtgtctgtgtgtgttgtgtgtgtgcatttgtctgtgtgtttctgtgtgcatgtgttgtgtagtgtgtgtgttgtgtgtgtctgtgtgttgtgcgtgtctgtgtatgtgtctatgtgatgtgtgtggtgtgtgtgtctgcgtctctgtgtctgtgcctgtacatgggtctgtgtgtgtgttgtgtgtgtgcatttgtgtgtctctatgtgtgcatgtgttgtgtagtgtgtgtgtcttttgtatgtctgtgtctgtatgtcagtgtgtgtctgtgtgtgtctgtgtatgtctgtgggtgtctctgtgtctgtgtgtcagtgtgtgtctgtgtgtgtctctgtgtcagtgtgtgtctctgtgtctgtgtgtgtctgtatatgtctgtgtgtgtgtctctgtgtctgtgtgtcactgtgtgtctttgtgtgtgtctctgtgtctatgtgtgtctgtgtatgtctgtgtgtctgtgtgtctctgtgtcagtgtgtgtctgtgtctctgtgtctgtgtgtctctgtgtcagtgtgtgtctgtgtgtgtccctgtgtctgtgtgtgtctgtgtgtgtgtgtctctgtgtgtcagtgtgtgtgtctgtgtctgttgtgtctttgtgtctgtgtgtgtctgtgtatgtctgtgtgtgtgtctctgtgtctgtgtgtcagtgtgtgtctgtgtgtgtgtctctgtgtctatgtgtctgtgtgtcaatgtgtgtctgtgtctatgtgtgtctgtgtgtcaatgtgtgtctgtgtctatgtgtgtctgtgtgtcaatgtgtgtctgtgtgtgtctctgtcagtgtgtgtctgtgtgtgtctctgtgtctgtgtgtcagtgtgtgtctgtgtgtgtctctgtgtctatgtgtgtctgtgtgtcaatgggtgtctgtgtgtgtctatgtcagtgtgtgtctgtgtgtgtctctgtgtctgtgtgtgtgtctctgtgtctgtgtcagtgtgtgtctgtgtgtgtctctgtgtctatgtgtgtctctgtgtcagtgtgtgtctgtgtgtgtgtctctatgtcagtgtgtgtctgtgtgtgtttgtgtgtgtctgtgtgtgtctctgtgtgtgtgtgtgtgtgtatgtctgtgtgtgtgtgtctctacatctttgcgtatacaggggcatagcatagtcatgcaaaaccgtcttccttcaactcatagttctctccttcctcaaccagaagccactctgctttgttgtgaaaacaaataaactactttcttacaaaagaaagaccaaataacctgaaaagctcaaataaaatccaccttatgatacaatattaagaaacagaaattttcaatggagaaaatcccacaccagactgaggaagacagatcagtttaactggagtctctgtttgttttatatttcttttctactctccactcccatttgccaacaaaactatgctctctcacaggggacaggttcacccctcaatgtctgactaacatgcttttcatttgaattcaaaatatttggtgacgattggcaaagaatgaggatgggaaattgaatattacatcatcttatgaaagcttcctcctccctcacttccttcttcctttcttcctcctttctctccctttttccctccctcctttcctctctcccttcccttttctgttcctgctgtgaccgttcccctgattgagcagacgtggacatgggggagtcaactgtaggagtgactggcgcctcacagacaccgtcctctgaggtagctgtcaccagaggattgtcactgaaaatgcaagaagagtttggcatttgattgcattctgcacaattcaagcaggacaaattgctgcagaagatgacaccagaaatagccaccatgtagtgggttctcaccacatgacagacacggtgctgctataagcttgtgacttgcactgtctgagccctgaacacctgtagcaggtacgagcatttgctccattttcagaccaggagacagcagctcaaagaaagtgaacgatttgtcagtggtcacacagctaggaagtggcagggggcgcttagccgggttggactctgaaggtcatgcagcatctttacacagacccaaacccttcaaatcgatttccacccatgtgtgtttggcagccacatgtcaacaagccataactttcttacctatttcgggaaaacattattttctctcacctgtatttatcgtcatcctatttctgttgcaagaaatcaaaacgtgaagaagatagatttgaagaagacctttttttggctacttctgatgatgagatgcagttaggaagatggagttcagatgctaaaatattggaatttctgattgatgcatattcatggttagagggaaagtaagttgcactgtggagttaagaaatctgagaaatacaggaaatccaagctgagaaaaactcataactatgatgtttccatgtgcaggaaacttcaggtccttctgcgcccaaccttcctggaaagcttttatttaaaaaagtttttaaaatttttatttagttatttttaattgacaaacaaaaattgtatataaaggcttttgtattttatcccgtatgataaagggccgcacggttctttcttgatgcctgagttaagtgagcatattaacagcatgcagcgttcagctctcattaattttcaataggctcatttacctttgacccttttatttcaaagccaaaaaaaagaccatacatagagagaaacgattgcattatagctcctccttcaatatgagtcgctcaatctctaatggtttctttccatcgagaagaaggttttagtaaccaagtgactaagttacctagctaaactcccccctccttctttatcaatacttaattagtattgatgcttttcttggctaaatctcatttcagagcctgcacaactgaactttttccataaatgaaccttttaaaatgtgtatttgaaatatctttcagcctaagaaaatagtttttaacaagttatgcattgatttcctcttactctgaaatatttctcaagtgatttttcctgaaagattctttgtggttcattgaacacaaaaaacaaaccgtgtaccaggtctggtagaggttacagggatacagataacttggcatttgttcccaaggagcttaggtctccaagaggaaataagacacttcgacaaatagccacaaggtaaaatagagaattgtccagtgctgtaatttaactgctgattccgctgtacctaaaagctggttaaattatagttttattgaatgctaacaaactcttattcccctcctgcatggaattttaaaaaccttttattttctctgggctataattatggtgaccacattttccatggcaaaaattaagacacgtcgtctgacaaaggattcttgtgccacttctaggtgtgagaccacccatacttagattttttttaaagcaggcttttttaggcaggccctataaaaatagaggtttgttaaataggtgtgtttttagacttttcattaaaagcctacaatacaaacagtattttattttgtatctgaatcaacatgttatatcctaaagcactattttacagcctaagggtgtgtgttagtctattcataaaaacatactgctgcatagagcaataatacctgccattatctaggtgtaataaaaaggtcccaagtggtcctctccaggtctttaattttccttttgaagataaagctccttctttcactttcatggttcaagatttttggaccttgcaagtgattgctattgaagtgtgccagatgtgagcagttgtgagcatagtactttaaaagaaggtgaaggagtgactttttcttccttattgtctcccctactaccatctgtagtttctacacatgtaacttttccaaaacagcaaggcatgggaagggataccagccagggccgccacagtccaggcatgggacttctgaagtgaggagatagagatgaaagcggcctgtattgataaatgacagatgatgaaaccaaggcctgctggaccaagattcaatgacttacccaaagctacacagcttgttggtggcagagttagctcccaatccccagctttgtgagcaagggaggtttccatccccactatgatgttttcttggtgttctggggtcactctggtcgatttccatccactgtgatgttgggtatgccccctccatgtgactacataattctagaatcataattctaaaatgatatatcactgcactatcatgggaaaataagctggaagagctggagaggcgatgcctgccaccactggctcttctatagaggtgaccttgcaggttaccaggacttccccaggccgactctcagatcctgaagctgagtccaaggcaagccttatacgccatggttcctgctctcctgggtatcactgacctactgctgatccaggaacccttgggatcagacttttcccattaatgctttgtttatggttaaaatatcacagagtttagtgggaccactgctgtctttattagatggtttttatacttaattattttgtaacatggctgcacttgtaagttatctgctgatttttttgtagttcataagcataatgattgggtattcatagtcatatgtgagatgtgccaacctcaatctctatgctacagtatagagtatactataataatcactatattattacagcctggccaacatggtgaaatcccgtctctactaaaaatacaaaaattagctgggcgtggtagcgcacgcctgtaatcccagctactagggagactgaggcaggagaattgcttgaatcctgtggggcagaggttgcagtgagccgagatcatgccactgcactccagcctggacaatagagtgagactccatctcaaaaaaaaaaaaagaaaaaagtttaaaaatgtatctcttccattaaaaacatatccaataattctgctaagatatttgactgaccttcacattcagcctcattccagtgtaacttcccattcattcatttcattcaatggctatttattgagcacctactatctggcagacacttttctgcttcagcatcaaacaaatagacaaaaattccagcctgtttgtggtttatatgggattggatggtgctaataactgtatcgaaaaataaaaactattagcttgccaaaaatttggattactgtgggagcagagagctaaaggaaaagggaactcatatgtattgaatatcagtgactatgtcatatgctgtgttgtgtggtttatctcatttaatcatcacagcagccctgtgaaagatgaatatgattatttttattttttacagatgaagaaccaagatttaggaatataatatatcttgcttaaggtcatactagtgaggaaataaatctacatcagtcttttcaataccatgctagatgtgatgatatcattttagaaccatatgtttgatatatggaccaccatactgaaacctcagggcacatttttgtccactaataatatatatcaaggaatgtcatttcacagatgcatggatacggaaaatgtgtgtgtgtgtgtatatatatgtatgtgtatatatatgtgtgtgtgtatttgtatgtgtgtgtgtgtatacacacacacacacacacacacacacacatacatactactccgccttaagaatattttcatatgcaactacatggatgattcttgaggacatcatgctcagtgaaataaaccagtcacagaaggacaaatactgcatgattccacttatatgagcatctacagtagccaaattcacagaagccgagaacacagtggtggttgtcagggcctaggggaagagagaaatggggagttgcccttcaacaggaataaagaataagcaaatctcatgttaagagttcttaacacacacactcacacacagacacacacaaatgtcactttaatggacatgtttaaaacatcatttgaaatgtagttgttaagttcatgttctccttatcatttttgtagattgatcctcatttctgaatagcagtaatcactacagtacactctcctttcataacaggcatcttccatggaataccttgccccagattagcaatttgatgaccacagtaacatgtgcttctcagataacacatgacctttcatttggctgagaactcagcggttgactttgctaaaaataggtctttaatggttgagtgtgacatttcatcacggggtgttatttgggagtttttctcttcatacatgaaacaagtatggctgtagaattgattacccttgtttccttgatgaaacgcattcagaatttcaaagatattgaaaatatttttggccaaaattagttacacagaagtatggaatctgtcagtgcttggggacaaaacccttctgtgtattgaaaatgcagaagtagacagggaagcatttctggggaggagtgagaagctgtattaagtctggatgctggggcaggggtgaaggaggaggtcttgatgatgtaggtcttgaccaggttggagctgatgcaatggcaagtgctgtggccgtggtatcccctggtgatgtcattccaaggagccagctgccatcagtgctttcaagagtctggctctttgggtgaggggcaccaagggatagacgtgcacctcaggacacctgccatcttgttggccatctctctagtttggggtctttgtggaaaagatgtatgggccatgctttttagcttgtcttatcaccccaaatacttcccgtcatcctagaataatatccaggctctcgatctgatttccaaaatcttacactgccttcgcactgattctcaagcctcagctctcaccaactgcacactcccccattgcttgtgggccactcgaactgacttcctgatcctccaaacacatcaggttgctccctccttgggatcttccactacttgtgacttctgcctacattgtactgcccctaactttcccagggctggctccttcttgcctttcaaatctcagcttaaatgtcacttcctttgagaggctcccctggaacacccaatcattccctctcctatcaccctactttaattctctgaatatttctatacagtcaatgctgtgcttgtttattctttgagatccatgaaagcagggaccatgcctgtcatagtcccgacagtgctcccaagccctaggtgagcaccctgcacatagtagttcaatgagtagtttgtcaaatgaaggaaggaggcactcaggctgtagatgatttaaatgtaacaaacgtatttgtaggttattttttaataatgcaaaagaaatgaagactaggccaattttcttttttaatttcatatttcagcctcaacgcttagttatttctgattggtcagagattaattaatcacatgcaacagtctgtcctgagggggttcaaatgcactgctttttccagtgatttgcaaatgcaccggcctaaaacctactctctggcacagatttcagaatctccacttaacacatcagaaacctttagggcttatcctgaactccaaggctggcttaacttcttcagtaagcagctgcttatgcatggatgcctacaatgagtgatttcaccagaaacccacctcagctacttaaagtgtgatgtatttcatacacacaaagtgttttttcatatgagtaggttagtgacactactgaatacaaattaactgtttttgaatatactggaatctcacaaagttttttctgcctcagaagtggaattcagttgaagatgggtctgtccttagaagaccaagttattatagttgctaaaataaaaataaataaaataaagacttcaaaaaacaacagatgctggcaaggctgtggagaaataggaatgcttttacactgttggtgggaatgtaaattagttgaaccattgtggaagatagtatagcgattcctcaaggatctagaaccagaaataccatttgagccatcaatcccattactgggtatatacccaaaggaatataaatcattctgttataaagatacatgcacatgtatgtttattgcagtactattcacaatcgcaaagacatggagccaacccaaatgcccctcaatgatagactggataaagaaaatgtggtacatgtacatcatggaatactatgcagccataaaaaggaataagatcatgtcctttgcagggacatagatgaagctggaagccatcatcctcagcaaactaacacaggaacagaaaaccaaacactgcatgttctcacttataaatgggagctgaacaatgagaacacatggacacagggaggggaacaacacactggagcctgttgagggtgggcgaggagagggagagcatcaggacaaatagctaatgcatgtggggcttaatacctaggtgatggttgataggtgcagcaaaccaccatggcacacgtttacctatgtcacaagcctgtacatggtgcacatgtatcccagaacttaaagtaaaattttaaaaaataaataaagtaaaataagactttcacttactggggcaggcccatggtttctagggttgagaacaatctccaggggcttgaccctcaggaagggagaatcccttcttcccttgcagggagcatgggctgggtggcagttgtgtccctgccatctgaaagtgaaaagtggactttaaatgttgacttatatctcacaatactattggtgtccagcttctgatacttcatgggacattcctttgtacttgggatctaaccttattaatttagagagaagatgtagattaagtttcaaaaacctgaccttagaaaagatgttttaaataaagaatgggctatcatttgtattcgcaaatcacagagaatgtcccgtggcatggaatcattttgtcaagctctgcattccaatccaattttttatttgctctcatctcagggtggtaattgttaatttggagattattatttagggtggattcaacagtcttacatgggattctttttagggagaatgatgggaaattaccctttttcacatttttttatcctgggagagggggcctctattctttcgctcagtgtgacagtgagagtgaagtgaagagaagatttatgatgccaagatcagggctgagtaatatggtaaatcccagtttatcttaagtgcagtaaacccccaggcagctagaagagtgacgtattctggttagttcaacattctatttaatctgggaatacccaatagaccacttttccacaacagatttttatagaattcaaatacaacaaaatatacttgacaccacaactatactgaacacatatttatctcttctaatgacttaaaagacacttaaatatctcaccaagcctcagagtcacacggagaacatcagttatctcagaaacggctgttaatagggatttctggctgatagtgggatggcctgtttttgctgattgaaagcagcacttcattggatgcggtgggtggggggtgggacaccagttctcgttttcccaggtataattcggcaatctggggggcttcctcaaaaatacgtagaacctaaaatagataatgtatgaaaagccccctagtgctgagcctaacgcagaaaaacattcagtacatacaagatgacttgactcagtttatctgtgattggtttggtttacttttgcttttttcttttaggggtgggggagctcttcctacatagttaagggaccttcaactagaggaacttgatatacctaacctaggacaagcaggaactttttgacctccagcgttgtttatggtttcagactaagcaacaacagaagataactacaaggaactatcatgaattatggctaaatgctgaatggtgaccctttaaatcagttattagtatgactggattgtaccttctgccctgggacaagcctagacagagagagttgggagaagcaagtgtaaaaaagcctaggttgtttttctttttcttttttttttttttttatatgctgttaatgggagggtaaattcttgtaaagtttttggagagcgctttgaccttaattttgaaaatgctaagtttacatagcctttgtcttggtaatttcacttctacaagttttttctacctatgtgtaaggatgtctattacagcattatgtattttaattttgcagcaaaaaaaaaaaaaaaacttggggaaaaaaagaaatgtctgtgtagggtactggctaaattggtaaactgatatgaaataaaatgctgctattaagaaaggtgatggatacatatgaactcacattttaaaatgtctgagatttattgtagagggaaaaagtggaagtctgtatggataatattattttattgatgagaaaaaaattagatacatatacaaatgcatgtatattcatagcattttctggaaggatatataatatactgttcagctaatatataatttaaggattatgagtattataaattgaaattaatattattacaaattaatacaaattaagatttgttgatgtatacatagtattatggtaaaatgagtataattaaattattcaaaagtttgctttcttacatttgttaaatattttccagtttatgttctaatttgcttattccaatctttatttctatcacctatataattaaactccaattcagtttagggtcattcataatttccaaactgattattttactgtttcttcagtagtgttgaagataatgatgatggcactagtcatcccttattgaacccctatgatgtgctaaacacttgtacttatattttctctaaacctccaaaattgtaaaagttgatgaggaagcagaggccctgccatcttaaggaacttgctaaagccatgcagccagcaagtaagtttcagagctagcactgaaactcaggtctaacgccaaagactgtactatttccatatgtcattctgcctcagatatagagctggtgaattcatttttcaggcagtgtctttgtgggtaagacagatagctgcttaaaaagagatagaaaacatgctttggattgttatggcttgctagcattttccactcaccattgttattaattattctgtgtttcccatttgtcttaactttgatcgtatacttacaaagtttatggaaactgcccaagtgcattcgattctgctgatatttccatggtctgaacgccagccctatgagcaggggccaaatggagcatgccatctgaagactgctccagctttcagagctggacctggttcaaatgggaatgccataccactgtttattttaatgagataaagagcaaagaaaaataaaaaagcaaaatctgcatttgaaaacattcaagtaacgtaatctgtattagtcgaactaattctaagcctggcctggttttgattttagagatttccacagctccacgtgtacccccagggtggccatgtagaggtaacaacaacaatactaggaagaccattccaagcctctgtctccatttcttgcttttctgacacccttcacctgttctttattcagctatttactggggcatggtctttatctgaagtttttcctggtattttcaacccattaggataagtggggtgggtgtagggggctgtgcccacaaaacagacatccaacttggttttaggaaaggctttttagaggaaatgataactacacggagtcctgaaagagaaatcatagaggtagaggtgcccacttatctaggtagagagaacggcatgtgcataagggagagataaaagggcacacagtacatctgtacagctgtgagtccccaagcatctgacctctcttgaatgaggatattgactacaggttacttagttgaccttgttaaagccttatcatatcaggattaccagggtacaaaaacattcctaaaataaatggctctgttactaaacactccccttataacaccattgttgacactgtgacttttaaaaatctctcatatctggccatacctgtctcaccttcctaaagtcacactgacagatgacacaccagggcaagatgaaaactgtagggacttgtgtagaatgaaacgataacttcctgttcttaaaagggactgttgatataatatcctttttgcaaaaacagggaaatgcttaaggttggagtttctgttttcaataatgaagatggatattcacatgaaaagaagacaaaagaaaacagaatgccccagctgtgggctaagcagttggctatttttatttgtcaggacaaaaacatcaaatgacaattctttcttcatttctctttatgaatctagtactaaagaatgctactaaatcttaagttctattaactcctgacaatgtataaacttgggtttacagtttatatacaccacagttagggatttccatatatcctccagctagtcaagaaaacctttgtttggagttctttactgactattgcatcatccaaatttattttttgcctatgaaaactgaaaaggtgaagaccaaatttggaaattcacgtgtgccaatgcagatatcaacatgaacaaaagaaaaatacatgtattggactttggaaagtaaaatcacagacctattctggttcaaggtcagccataagtggaattgtaaagaaaggccagaaaataatatatggttcatactcaagaacaagaatggtcatatcatgtacaaaatgaattgagctaaaagataaacagtaaaatgctatggtttttattgttagcagacttccactaattataaattaaaggcagtcagtaatacccatagattaaaaagctagttgaaaactgagattcctgtagtaaatattaagcgttgtgtggtacattagtcacatgtgtataataaagacaataaatccatgtaagtacagcaatgatgaaatgtgcataaagcagtttgaactccacagaagtaagcaaagtataaatagatagcatgctcaggcacagagaaaagcaagtgctattttagcacttgagctagtgataatttattgttcaggctctccagttgagtcaatgtttatatggtgctatatattaactgaaaccaaaatagtctgtgcacatcactgtcttggatagattactgagtgatcagcagaaaccatatcaaacaaccactcccctacgagtgagggatttataatatttaaaatattcatcctaaagctccaagctgttttgacagttttgtctgttcataaatattcttcaaagagaggcagtatggcatatgtaatggaaaaagatagtaaagtggttagcattccaaactcaggacccagattgcctgggttcaagtcctggctctgttacttactagctgtgttgactttgggcaagttacttaacctctctgtgcctcagtttcctccttagtaagtggggttaaggatagtacctacctcatagggttgtgaagccgaaataattaatacaaataaaacatttagaataatgcctgacacagagtgagggttactacctagactctgccacagatcagcagaatgactttagataggttacttaaccttgacctttggtttcttctttgtaagatgcaaaggataataaacatcttacagtgtgactgtgagaatcaaatgagataccatatggaaagcagctagccctgaaggaaacacttcagattttcttcttcttgtctcttctcatcctttcccttgcagggatatttgtaaggacactttttttagcatctctgtatgtcaagcactttgttcctaccccactcacctagccttgaccatactttgtgaaatcacaaatagtcagacgttagaacccaaagaattgacctgaagacctgtccttttatcacgacactgcttttccatagaaatacttccttcagaaatccttttaagattaatgccacccaattctggcctactcacttcttgatcagtgtgggctgtattttcatttgtgacactgaatatgtttgaccatttcatgtatatgttatgtcttcccaaccaaagcctgtgttctgtgagagcaagcatctctcataactccctctggttagcctttcttgcctggctttcagtctgattggatcagaattggacaggaccagaggatttagcaggtcaggagtgattatcagctgtgaagttggcagtgtcgctaaggagtggaaccaagatgcccactgcttctggggccacattgatcacattcagacatccagaccctggaaaactcagggtcgtttctgagtctacagtctacattcaagaagaagggtagaaattcaagaagtggccaagaaagactttcaacaacttactcggatgtcatcaggggaagactaagagtatggccctcaaggcgccttcaaggatggcattacttgctgaattcatcatggtcggggggcttcaacagtttacagaagccttcaaatatttcaggaagcctctgcttccatcctactctcccctgatgggctacagtctgtattacagcaggaatccttttgcaatgagttgcacttatcttcaggcaaatgccccagatggggatatgaggttttatttacagtctgcaaaatttccctaaagagattggtgcaaagcagagctctatggacttcctcctggcatgcttgaagatctgatctgttcatccctcaaaggccagatccatctcttaggggctgacacccattaaaagccaactatataggtgttcaaacaagaatgccagtgtattcatctgtaatgagaatatttcagattaatattcatgcttgcctggccagcccatgctctctctgcagggaagttttcctaggaagccagatatgctgcagaggcagcttggtgagcacagaatctgaatacaggaagttagaagagtgggtcggtgtcaagctgagcccacacgtgcattcccaaggtcttcttaggtagttggtcaaggctccttatccatggccaaggccagcgttggcctctcaaccagcagccgatgagtccctgctctgattggtagctctgtctcctgcaggtactcagttgagttgtaatcaaacacttcaggattgggaccattctgtttctttgcggggcctttttctcttctgctctgtcatgcgtctgtgccactgtggtcctggggatggtatgtttgagggcagggccccatgcaggctccttccacagcataatggagtgctgccttaagatacactcaaagaagggtggtgagagaggtgtgtggttattcttgctaacataaattgcactgtttaatgtacacaagagatgggaaaaagaagagagcaaaagaattctctccaggcaaatgtttactatggaaactgtgtgattacagatgtccatatacaattctcagacatctgtttaagccccccgcccccgccccatgcagaaggcgatggcgtgtttcctttcttctgaactccttccacacatggaatgatgccattgccagcccttgtcttcagtcgcctttttcagaattggtttacttcttgttgtctttgaattttctctcatctagaggctgctttggccctctgaggtacccacgggcacagctgagctgatggccaagcgcggaggccccatctgcagctgtctctcatgaggaacagctgtcccatgcccatggggagagcaagtcctgtgtcccaaacagctctgtgccccacctcaccctcttcgccataatagctcaacttccatgaagcctgctgtgatgtgagccacaacaccaactcctgggtgggggtggggggcattttcctctcctggagcaatagaggagcagacacctgccctcttctttctctccctcactgctagcccacagccaagagggaggtgtccagaggggtcatttcctgccctctctggtggcttgccctccatgagttgctgttaccccttctgcacgctcatctgccagctgatcttacttcgggtggaaggttttgtgtttgttttccttccccagcacttccttgtccatagcaaggggtgggtctgagccccaccatcagtgtgacatgcatctgctcatttgtgcattgacagagattcgtcagtgacctaggcatgcccagctcggtgctgagtgctccaggcagtaccgtggcttcaacagtttgcagaacccttcaagtatttcaggaagcctctgtttccatcctgctctcccctgatgggctacagtctgtcttacagcaggaatccttttgcaatgagttgctcttatcttcaggcaaataccccaggtagggacatgaggttttatttaccgtctgtaaaatttccttaaagagattagtgcaaagcagaactctatgcaaaatttttttgtcctacatgtggtatgcatgtttgtgtgtgtaataaaactgcagagttgatttgcagaatgggccaatgaagcctgttttatggtctaatttatggcaggagaatggagtttgcacagccaccccttgtttcaggctgtttaatatgcagggtggctgtggtagctgctctctcttcttcctgtcacccaccctgtggacatcccccggtctcaagggagcagcatatgtttttccacagtcccttctctgcagaggccagccaaggacgcattttgtccatcaggtgttaggatcctcgctccatgcggtcagctggtggtagctctgtgttttctcagtacagatgtggctggactggcactgggaccacctgatccttcttcacagggctctgtttcaaaccgtgggctggtggccagaccctcttcagcctgagcatgtccaggtgaatctcctgattgtgcaggctgtggctgacagctctggatagggaacagcttccaaccttggctgtccactagaatcagcctggagtatttaaaagttctggtgtccaagccacaccccaaatcaattctgccacactccctaaggataagacccagtgctctccaagtgatttcactgtgtttgcaagattgagactaactactctctgggaaaagagaaaggaggaaagaggaaggcagagcaagataaggggagaagattggaaccagggagaaggaagaaatcaagggctggccagaggtggtgaagtaaggaggtgccccccagcaggtgcctggagatccccagcaaaaggacgatgtgcctgccccatctctgaccctgcacttggacgtgaggaaccaagagaggctcagaagaggaggcagggctccttctgtggaacctgcatgcatctgcccttcccatcagacagactgcttcctagccgtggatttccagatccagagttcactggaatgtctcttagcttctgtttcttcatccacaaaacagagacgtcaaatcgtacttgcaggttgtcatgtggatttgataggatgatggtgaagttggacacatgtctgacattctgcaagggaagcttaatgatgatagaccttagaagaagtccacaactctatttcaagttaaccctccccataacttcgttctctctgctgtgctgaaaggcagtggttctgaaatgttgttttaggagagctaaaaagaaacacagaggtccgggctcactgacgggtccaggcatctgcatttttcccaagcgccctgggtgattctgacggccagtgcttgggatcctctctacaggtgaaggtcccaatcgcaaagctaagagagagagattctgtgttgctcacagagctttactgccttccagggcttgttttgcacctcctagttgctctttctaatgatttcagtgactgtcccacctcaacataggaaagaggggtatgcgaggcgtgccagggccagcagccacacaggggtaattttggctaggttccacctttcatttacaagtcaaactgagatgaactctaaaactggcatcctccaaattagtaacctgcagccaaacaaggagaaaacgctttttcatttctggtggcagaggtaaaaatgactggtctgtcttgcatgttgcacttgcttgtcctgaaagctttacatttggggcctccgtcgtgagccatgagagtgcatggtgaaacaaagcatcttctccacattaatatttgtttttaaaggcatgaaaagccccttggatcacaatgaatcaaagcgtctgtacactgacacgtttccactgggcattgtgggaatgttggtctgtgggagcccacaggacccttggtggatttactgcttattgtttttgctgtaactataataggaaaagggatgtgtctgcccataggagcagctaccgtaggagccctgagaggcccgggagctggagggctaagggaccttgatgatggagagccccatcactagtagtttgagagccccatcactagtagggggtctaggagcattggctggagaccccctatcctacaatgcagcttcagttccccctgcttctccgaggcagagttctcaccaagggcagtactcagctggctggcagcgaagcattcacgttgccgtggtcagcctgggaaagtggaaaacgccatggagattaagcctggggtgggatgggcggtctggggtggggtgggcggacagcttctgcctccaccttctctctccaggggaagcagtgctgctcagcagcccccatagagccggggaatcggagcaagccgtttgttttccgtttcacaaaggaggagaagggattcctgctgcagtttttgctgaagagcaagacttcctagcaacacccagagcttctgctttagcaaaggattttaatatctcccttccctgctcttccccatttggctagggagctggtgtctgattcagaaaagcaacttggctataggacatcagtgttcctatggctaaaacacattttccataagccgtcaggggttaataaaatatcagctaggcatgtgtagtgggtttggaagggagaagaagggaggaaaatgaaagggaagaaggaatgatgccgaaaggtaagggtttcctaatcaggtgaagcatagtgcttaattgatagattgcgtagatggccatgtgcttttgtaacttggggctctgaggtctttcatgaaagggatagctataagacattcatcacaatactgcagaagtctcattgagtgagaaaagagaaagctaaatgaatgatcaatcagagaataaggacacttacaacagcaatgaaatcgagcatctgttgagctactgtgtgctatgctgcattctaaacactataatacctggcaactcatttcatcgtcataagaactctcaccggcgagttaggtactattatcatccccaccgtaggaatgaggatgagagggcttgatcggaatctcttgacttaatcaatgtgagtgtccatccaaggaccacaggtaagattcaggctgggtaaagactgagtcctttgctgagatatgctccctcccctaggtggagttgggaaccttcgcctccttacctgccttccgcaccgcaacatagggctttctgggaaccaagcccataggattagaactcctttggtatcgttacctttcctcacctttacaaatagcaccaggagaaaacatgggaaggggctcttgtgtattatagcaggcacagacagttccaaatatttgggatgagatgagagccccaggggccctagagggactcaggatggccttttcgggggctggaatgtacggtgtgtctgagaatctggcaatgctgccaaccggagcagctttctctcagcctgtctcaaattctctccttttctgcccatgtctagagaactcagacaccttttcttttccctccactccagcagccttactgagcgcattcccaactcacaggaaatgttcaggggtgggtggaccattcattcccactctccattgcagaatctttgtgtgtgaagggcaggaaaataggttaaaacagccattgggcactcatgctgtgcttcaggaagtctgctccaagattcccaagcaggctcaagaatggaagcagagagcaagccagaaatatccttactgctttattttattattattttttaaattgcatgttggtgcttttccattaattttaattgactcaagtcccatgacttttgtgatccccaaatcctccataaactcacttcaactgactttttttttttttttttgccttgaacccctttcccttccctgcctgggaacctgccctttaaattggtcatggctgggattttaatcactcctcaaaggcgcagtgacaatttcacaacaaagcagggaggttgggggtgggaaggggagggagttttgttttctactccgattaagagagcaactgttctctgtttgtcccctggggcccactcttggcaccaggctggggagacctcaaacttggtgttgcaacatccatcagacccaagtgagtctggggctcctcaaaggtgaactgcagctgtttggataaaattctaaaatcttgtttgggagattctcagcccttgttttacaatcgttcttcctggcaaagaaaccaggaagttttactttcccaggatctcaggcaggtaattgttttcccaaactgtattttaatctgatggaaatggacattctttgctctgagaaccttcgcccacatccataaaccgtttgtatccgccttgcgcatgggaggctcgattacacagcgccccgccctcccctgagacgcgcttccatctctggttataatttagggccattttcatttctaaacaacagttacgagccttttagtctcttggcatctcggagtgctttcctgttcagcggcggaccacagccaggtggtgggtgatctcccgaggttgggaattggcaaaatcccttacgcggtgtcatttttaagcaaagcagcataaacggtgacgagctggtagtttctgccataaccaatgctttcatggcccccaggctccaactgatttatcatgaggcctcttgctcaggggacttggctcacgcctgaaacaccagaggccccgagtctgggccctgagctcacactgggactgtgagcttagggaagtggctgcaccagtccttttggaggtgtgcacgtgccctcctcatgcaggctgacctggcggggctcttatggggaggaggggggctgagttaattctccacccctgcactttctggagatgcggagagtccaccacagggaggcagatccagccctccctagtgaattaagtgactgcaaacagagtcagcttggaagcttcaggcagggtcctaccccctatctccgccccttcttcttgggggctgtttcttgacccatcattaaaaatgtaaaagccaaaacgtttcaggggaaaagtccaatttgccagaataactttgttactcatcaacaaatactgatctatcacaccttgtgctaggtgcctccacgctggagaagtagccagcccatttaaaatgtcagcaaagattccagttgtctaaacgcgccagggacaggcaaggaggataagtggtgtgaggaggatgctgggactcagctgaagttggaaagctcacagccggtattcagagaactgcaacagggtcccctgggatattagcacgcggggaacctgccccagcatcagaggccctgggtcaggcctggtttcttaggtgttctttgtgctactcctcattttgtggagaggcatccttggtagaagtgaattttgtaaaatatgcaaaggtatggctgaatagtgaactcttcccctgtcctcaggaaaagcacatttggtacctcctgtcagaggggactcagcaatccactaaagactttttttttaatttattttttacttttgaaaaatgttggcagggtgcagtgactcacccctatggaagcgggtgaattacttgagcccaagagtttgagaccagcctgatcaacatgatgaaaacccgtctctactaaaaatagaaaaattacatgggcgtgggggtgtgcacctgtggtcccagctactcgggaggctgaggtgagagaatcacctgagcccaggaagtcgaggctgcagagagctgtgattgtaccactgcactccagcccagaagatgggagtgagaccctgtctcaaaaaaaaaaaaagaaaagaagaaaaacatcaagttcttcgggaagggttgggaggtgataaagagaggctgattaatgggtacaaacatacagttagatgaaggaataagttattgtgtttaatagcacagtaagttggctatagttagcaatttattatatatttcaaaatagctggaagagaagattttaaatgttcccaacacaaagaaatgataagtgaggtgatgagtatcctaaacactctgatttgttaggtattgtatgcatgtatcaaaatatcacatgtactctataaatatgtataattactatgtatcaattgtaaaaaaaagaaagaaaagactattactgcccttgcccatttacccgctactaccacccactcactcttttattcactgacttattcactgtttgatttattcatcctttctttcactcgttcactcactcattcaatcaacaagcagtccctgaacaaatgctgactctgtgcctgacacggtctaggcaggcaaacaccctattgggagccgacaggaggagggttttggaaccctggtccccaggtgcctgaccacccacattggcctcctaggctgccctcctcaggcccactgggtctctagtgtcagaaaggactggccagaggatgagagacagaccaatttgttaggttaggtctcatcattatagaaaatattgaatagtctgccagtgattttatctcaagcattctcaaaacactcatttccatcctgccattgctccccatgctaataaaggaaaattctttcaatagaccatgccaagtcctgaccagagcgaacagaacagctcgtctagggaagcaggcaaccaaaccacgctgtgggagttcaagctgagatcattttttagatttccctttgcttgaaaattccatccacaattttcacccaccttcccatcatcccaagtcatgtatccttccatcataacaagtcacatctccagtgtgagtgcctcccatgtcacaggcagcagagaagattacagtgaaactattcagagaggtgtgagccccgtagaaagctggagatcagaggatgcccgtctctcaggctcctgatactcttaagaaggtgtctaaatagattgtctcctgagtagtcccaatagctttgctgtctgatgtggcgtggagctccagacaactttgtctccctgagagtatttttgggcacctgtgtagtgggaggaggagagagcaagggttgggaaatctgactttgaatctcctctctatcatttaccagctgattgatccaggccaccccttcacttcctgaagcctgaattttcacactttgggttccttcttaaatccattggtaaaacaggtttagcaccaatggggaccttacatgaactaacagggctggaattcacctaggttgcccagctgtgctggctgcttacagctggctgaagcctagtctgattggcctaggtgcacactatgctggttgctagatgttttgaatatgacttttggaaataatatatgtgaaagtctctaggcagtacaacagatggttagctaattcgactatagcatttggctagtaccactcccacgtctaacttaaattatgtttcataatttttttaatcaattgacaaatggaacaatctttaaatttgcctgtatcttttgagggtcaacaaagaagttattcagtgtttagggctgagccttcttttccagtattttttcatgaatgctagtgatttggttgcccaaagttccagggaatgaactttatccaagctttggagagtgactgaggaagtgcttgtggggggcttgcgaatgacgataatatttgaggaaggtggcttttgacaaaatgtggtagacttcaaacaatgtcaagacagatacccctcaacctggatttgtgggtcagtgtggcatcttaggtgaaaacggcagacatgtgtttttaggagtatgctatatagttcttaatggaattccacaaaatttagtgttttgggggagatgacagagagattgagggaagaccgtagaacttcttaatgcttttttttttttttttttttgagacaaagtctcactcttgtcccccatgctggagtgcagtggcatgatctcgactccctgcaacttccgcctcctgggttcaagcaattctcctgcctcagccccccgagtagctgggattacaggtgcctgccactacgcccggctagttttggtatttttagtagagacggggtttcaccatgttggccaggctggtctcgaactcctgacctcaggtgatacacccgcctcggcctcccaaagtgctgggattacaggcatgagccaccatgcccagcctctttatgctctttataacagaaaatgaatgtaccattttttacttgggtctcagaaaagacaagtatgagttggtgtttaacattagactaggttgtaaattgacaggagagccatccacatacatcagaaaaagaggagcagagaagaaaaaaaaaacaacaataaaagacctgagacatccattcatccacccgtccatgcgtactagaaattctgagtttcaattgtgtttctcattgagttttgggttcatagtcttggctgggtcccttagcattaagtgaaacaactgctaacctaggaagtaggtaatctttgtttatttattatctgtaaaatgaggaacaaaagagtactcatttcatagaggttttaagaattaaatgagtaaatatacatatgtgtatgtgtctatatatagtcatatatacatatagtattatagatgtgtgtgtgcatcctttgataattaaattacagctatgtatcctctctccagaaaaattcacaaacacaagaaacttagcctaatattttcagagattttccaaagccatgggcctcattccaattatccaagtgaggaaaccctttctatactgaaattcttattatgtttttctcacttaaaaggaaactgcaagtcaaatttgattatagtcagtattctacaataaatatttctttgtggttttcatccccctaagatttttaagctcagtcatgtctagaatataccaaatgataagaagtctgatacaaacaagaagtcttgtcctattagagttcatagtaatagcatttgatctataataacagaaaaaatattgcatggacatacattaatctattcctgagcttaactccagatgaggaatcagtttttatatctcatttgtacagggtggagagagatgggcttttttctttcgatttgtttttccacgtctatttagagcaaccaaaataggaaaactgctgcacaggtcttaaaattcacttcctccatccgctttccgaattctgctccaggtctgatgactataactttttatacatgtcatttatttttatttttattttagtctaaatgtctcttcaaaaacaccagggaaaaacatttttagcttcactaagaaaacaaacatgtttaaacaacccccaaaatgttcaggtagagtcggtgtttttggcttgtgtgtattttaacggtgagcctagcaaaatatatgttggaaacagaatttttcttcatcttacatgtgccagtttctttctggaataaaacaaaaaggagaattgatcacaacttctatattggagctaaacttcttgtggttgtgaaaggttatttcaagttaaacaatatgatgtcttttttcagtttttaattacgattatgtgccagtttctttctggaataaaacaaaaaggagaattgatcacaacttctatattggagctaaactttttgtggttttgaaaggttatttcaagttaaacaatatgatgtcttttttcagtttttaattactatttatagacatcctgcgtagagtcaatcaatgggaatgcaggctatggtgcaagtgaagacaaagctgacctaaaggaggaatgaatgcggagttgagatccgttggtgcatcatgacttttctgccttcatgatctcattgaatacttttacattttcaggtagagttggtcatttagatgggaattcactgtttttgttttttgttttttgtttttgagacacagtcttcctctgtcgcccaggctggagtgcagtggcacgatctcggctcactgccagctccacctcccaggttcacgccattctcctgcctcagcctcccgagtagctgggactacaggcgcccgccaccacacctggctaattttttatatttttagtagagacagggtttcaccgtgttagctaggatggtctcgatctcctgaccttgtgatccacccgcctcggcctcccaaagtgctgggattacaggcgtgaaccaccacgcccggccgggaattcactgtttaccattttgatgcctactctcagggcatgattgttgagtccccaaagactcaagtgggaaaataataatattctgatgaaaaagccagatccatctcaccagttcttcaggaccaagcagcatcagggtgtttagtgtctgcgttgttcttgctcaacagacagataagtgaggaataatactcacgagtgaggagatagtagctgtgcagcaagtgagtacgtgaatgaaaggatgtgaaaagtaattaccaggtgaagtgctctgtccatctttagaaattgttcattaggattgtgttcattcactgtgtttttaaactattaatacataagaccatgctaagctcaacatgctctgaatcatgggagtcagaatcatcctgtgccttataggtattagcccaattacaggtcagagttgaaatctaactctgatatataacaaatgtatttgatattctatctaatttgtgtatatatttatgtatgtatctatttattagagatggggtctcgctttgtcacccaggctggagtgcagtggtgtgatcatagctcactgcagcctcaaacccctggactcaagcaatccttctgcctgggcctcatgagtatgtgggactacaggcctgtgccaccactcccagataatttttttcttttaattttttgtagagacaaggtcttgctctgtcacctaggctagtctcaaacttcaaggctcaaggaatcctccagctttggcctcccaagtgctgggatcacaggcatgagctatgtgcctggccatatttattatttttatctcttacagcttgaagcatatttaccatatatggactagctttctttcaaagtttcattttacctgtggcatcatatagctgttttgtgagtgcacttaactagactctattataactagatgttatcaatcagttggttattgtcagtaacatcccttctcatttcatgattataagtgctttgcccttgcaagccttctgaatgctcctgggccaccagttgctaagcattttctttacatgttatctgagtttatcaggatctcctaacctccctcactccagcagtgaatcaggctcattcacaccgtgctagtggaattgcagggtagacacactatgagatatatcagcaggctatttaaatcctttcatttcctaaaaggttaaaaggccagatcttagaaattaaggtgttggtttttgttttttttcttaaatccattaacctggcacagggactgatacttgaaaattacactagtaaactctggccattgtcaaatgatggacacgtatcacacatggcttatgaatacttaggcaaagcatggtttttagacattttaaaagttcactttgaattcagaatagaggaaaacattataacagtaagaaaatctcataaaagctgaatttatatattttactagcattatttcaaaaataaatcgttccttttctaatctgctcaaaaaagtctatttactaagaatacctaagaaaacattggcgtctacctgattctaagtttttggaagaagacactcgattggtgtaactctctatcagtgtccagccaactgttgacagtcacccatgtgcgacctgtagcttgtgagcccagtgaccgtccatgacaagcctgattaatttcatacctgctttgcacattatcgtttgtacttgtgtttccttatgtgcaaaatagaagtacgactgaatgaaagttttaaagagtgcagatggccccatgatttgaagtcttgagcacatataaagggcagacacaaggaaaatttgcagaaggataatgaaatgggagaagaactccaaagtgggacccaatttactggtcatataccgaatgtgacttgcatctcacagtgttagtggaggactttctctgacctggggttgggtcttttccgcataaacaccaaagatggaagaaaggaagcaaaatgtaatgtagctgagctttggatggattaagtcaaggtcatataaaacagttccaagcaaaagtggggcccaggtgtccatattacgagttgctaacattgaacactgactatgcacaaggcaccattccaagctcattgctatattattgtagcccattgaaaacccaagtttctagatgctgccttgtctgcttggtgttgcttagttcaatgagttattcattcattagtatgagagctcacacttaccatgtgcccgtcactgttttaagcatgtcgtatatagtaacatattttatactcccaagaacctaatgaggtatgcactatcattagccccattttatagatgaaaaaaactgaggcacagaggcatttagcagcttgcgcaaggtcatgcagtggtaagtgactgagccaggtttaaagccatgtgtgtgctgttagtcaccaagttaggcttccttccacatactgatcactgattacggtcataatatggctattgatgacatgagtttgcttgttacagttgcaaggaaaacattgaaaaatgtgtaaaagaacattaaaggatcatctctattcttctcaagagataagaattttaaatagcattagaattactttgatgacggccaccggcatctaccccttaaagaaaacgcgctgggcacggtggctcacacctgtaatcccagcactttgggaggccgaggcgggtggatcatgaggtcaagagatcaagaccagcctggccaacatggtgaaacccccttctctactaaaaatacaaaaattagctgggcatggtgtcacacacactgtagtcccagctactcgggtgactagagcaggagaattgcttgaacccaggaggtggaggttgcagtgagccaagatcatgccactgcactccagcctgggtgacagagcgagactccattgaaaaggaaggaagaaaaaaaagagaagagaagagaaaagaaagagaggagggagggagggagggagggagacagggagggagagagagggagaaaggaaagaaagaaaaagaaagagagagagagagagagaaagaaaaagaaagaaagaaaaagaaagaaagaaagaaagagaaagaaagaaagaaagaaagaaagaaagaaaggaaggaaaggaaagaaggaaggaaggaagaaagaaagaaagaaagaaagaaagaaagaaagaaagaaagaaagaaagaaagaaagaaaaacacgaaggggaaaaactattctgtctgcatttaacttagaaaacaagggcctgttgtttctgaccgcccaaaagaagccctccatggaatcgattaggaaataagtgtcaccagggatgatcaggtgcctgcctgtgcctgtagtgctgggaagcccatgttagattctcagaatcaaggctggagatacttcaggagagtcagccagaggctgggaattttgcctgtttattcaatgctgttaggccaataagcagctttcatcaaatacagttaagaccccaagataaagacagatgaccgctgagcgtgttcaatcctgaggacttgggttgttgctagttagttgttgagaatggctccccactttggattccaatagggaaagtgcaatgtttctagatcccaccctcaggtcaccttttctcttcctacaacatgcagaccgcctaaaaagccctggcattccaggaggactttatacttcacagaagatgagggaatctttggaaatttaggcgacagaggccagacataccaataaacggagcagtccacatttccccccagttggaaacagatcagaagctttaggcattggaaaatgctagccacatagcattctgagtttgagcatctcgtggatgtctggctgtggacgtcagctatggatgacgataagcctcctgtgactctccatgcagagtcatcagtccgtgttagaactgcagccagcaaagaatgacctcagagactatggatgtgcatcctccagggcctcagtccccacctcaacatttggcctgggcgatcagttccagtgttgacaggtggcagctgctggtggtccaaggggacttaggacatttttaattgttttgtagacatggaggtcttgctatgttgcccaggctggtctcaagctcatgggctcaagtgatcctcctgcccatgagccatcacacctgaccccagtcctgtttttaaatgtgcccagggaaggaattctaaacctcctttgtcagacttcactttggcaaaatgatccttggtacattggcaatggatggaacaaggaggcatgggcactcttgacacattctccaataggcccctctgcctttaggcagaaccacctgcccattccagccagatggcaacaatcatgttgttgttgttgtttagagaaagggccccactctcttgtccagcctggagtgcagtggcatgatcataggtcactgcagccacaaactcccgggctcaagtgatcctcctgcctcagtcctgctaattcctttatttatttttttttttttttgagacggagtctcactctgtcacccaggctggagtgcagtggtgtgatctctgctcactgcaacctctgcctcccgggtttaaatgattctcctacctcagcctcctgagtaggtgggaccacaggcatgcaccatcacacccagctaatttttgtatttttagtagagacagggtttcaccatgttggccaggatagtcttgatctcttgaccttatgatccacccgccttggcctccccatatgctgggattacagacaggagccaccacgcccagccaacatccggctaattcttaattttttttgtagagatggaggtcttgctatgttgcccaggctggtttcaaactcttaggctcaagtgatcctcctgcctcggcctcccaaagcactaggatgatagtcatgagccatcacacctggccccagtcctattttatttttaaatgtgcccaaagaaggaattctaaatctcctttgtcagccttcactttagcaaaatgatccttggtagctaggcttttcctatagcaagaagagaaatctgacttagagagaaaagttatgtatttaaaatgtcctagaaggctagatggatggatgatggatgttggatggagagaaagagaaaaagaagtagataaatgaatagatgatattcatgatagatgaatagatagatgaaagagaaagggaggtagatagatgaatgaaggaaggcgagaaagacaggaaataggtgactgtaagagacagccaaccccctagcaatgagacatatttattatagaattatacaccaaaggaggcctcttaaaacccattcaaaacagaagccaccttccttcgtgctcccatcacctttcccacatccctctactccagcaccttctcatgttgcaacattagaatttgttagctgttggtctccctggctggagcatgcgaccataaagcagggattacatctcattctgccgtgtagtctcagcatctagcccagtgcctagcacctggtcagtgctccatggaaggaaagacaaaaggaaagaaggaggggagggaagtacatcagtcaaccaatatgataaagaaacctgtataagacgatagtgtcccttgtcaggaatgcatcatttctaatgctgcaatcattaatgttttactaaccaaacttaacctatgtgatacctcatatcccgtcggtaagctgtcatactccaagtcaatacagtgatagcatctgcccagtgttggaggggtgtgttaatgctcactcctgtttaacactgttctaagggacaccagttcattattatactgtttgtctcctaaataatttccaaaaaatgtatttcaccagggttccctgttaatatgtatacgttttccatgatctgatcatgatatcgtatgggcttggccagtgagagctggcgcagtcaactgcagggtgtcctcccagccagtgacagtgtggcttctgcaggtacctcgttccccagtcaggatatgcgtgctgtccagggtccagggacgccgtccctgccccgtccagggtcctggagctggcttgactcctcgccttacatcccccagtccaaatcctctcgtcttccaaggcccattccaaggttggccaagtttctcctcctccacagcggatccttctccccactctgggagctgccttgtctttctccttagcacttcctggtgtcacatttcttcctgccaaccacctctctctggggcatgggactgggcagtctataaagccgtgagtgccccccaagcccacagtccccctccgaggaagccagccagcagctggtcctcatactgagggccaggctttgtgtcctgtgggtctgcaaccctggccataaccagtattggatgaaggacccttgtttaacaaaatgacagtggacttgcttcaaggcagacggcacagctttaaagcgatccagcaaacgaactctgcccatttggggcatgtgatttttgacaatgactgtctggctcaattagacccaacctgggagtgaactctgttttcaacattgtcatatagcttgtttgttattcggacatcccctcgggcttagattccacccccctcccctgcaagccttctctagatcctaaggtccttgaggacagagtcttgctcaatctctttttgtctcccgccagtgtctgggccctttgcatccctttgtaaatgtttgttgcacaggtgactgtaaaacacctaggcccgaggccttcacccccaaggagtcagtttctccacggctccttttccggttgtgtagccatttagcctgagagaggtttgggataggagaggtctctccaggattcctgatgagtgtggatgagcctgctgagcagggtatggaagcagaagcagccattggccagggatgtggttggagggataaacacagaagatgcctgcggctccccaagccagggaggtctgcagctaggggcctggaagatggagacaaggcagtcagagaacaatgaagacagagccagagccatgaaaagtgacagcagcaaacccagagagagggacagagaccaacagagtcacacccaatgaggttcatccaaaccaagacacttccctccatggttgtcagccctgagctcctgtttcctcccttgggttgtaaattcctcctgagcagtggttgtgtttattcatcttggtatccttagagccttgcagggcaccacatgggggctggcacatggtaggcgcccaataataattttgaacctgaattgaattaataaaaatattcttctatttttatttatttatttatttattattatactttaagttttagggtacatgtgcacaatgtgcaggttagttacatatgtatacatgtgccatgctggtgcgctgcaccaactaactcgtcatctagcattcacattttcttaatccagtctatcattgttggacatttgggttggttccaagtctttgctattgtgaaaaatattcttctattaattgacttgaggatttcacagtctctcttgaaaatctatctacagggctaccaaggtttccattaccttgaacgctgacgttcacgccttaaatctaactgtgctttcttgccatggcttaagttcatttctcctccagtggtttcaaatgcatggaatgatttttcagccattcaggaagaaggaatgctgtgtataaagcctggattcaataaagccagatttttgaaaaacagctctttagcatcttctactacagacactggtctgggcagggctttttattttattgaatccagctgaagagcttgactacattaataatgggcttcatttccaaccactgcctcccagtctttccccctaaaagcctcatggtacttaagcaactgctaatacaggaataattgtcagtggcatcacttcctgccgtgatttgaccaccaggatgaggttttcttcttgtacctaatctggagttctcaggcataccatgtctggggctgccagatcatatttaaaatttgtaagcaaatctaatggcagctgtgatttgagttgtattgagtttatgttgagaaagtaggatttgggaagattctcttgggtatgtagtaatatttttctggagcaagcctacctaaagattgcccagaggttcaaatctcttatttctacagagcatggaagggtggtaccatatcacagggtcctgagggcggactggaagattttactccattcatttcaaagaaaactctatttgttcagctcccataccaccaccatacttctttctgaagcttccctggaagatgacatctcaccatcagttttctttacactggacttgactcatgatggatttagtacacataactgtaacatggtatccatacagaagataagctcctctttgcttcaatgaaaaaggccatataaaagcacacacctattaacaggaatatagcacagccactaagagcacagactctgaagagtctgattgccagattgccagagtttgagtctagcttagccactatgtgactttggacaacttccctccaatactttgatctcctcatgtgtgaagtggggaatataatagtgcctactttttaaagtcactatgaagtttaagatgaatggatatttgttaagtgcttagatcagtgcttgtacacagtgctatataaatgactattgttgtgtgttttttttcattttactgaatatccaatacattattcctctccacataacttcctactaggataaaaagtaaagtttctctttcaggcaacatgcaatcaaatttaacagctggccaaaagtttagtaagaccttgcttattacacctttttggcaatattaaaataatatttgtttcaatctaaaggttgcttcatctgctgttatagggctaggcactgtggggccaataggagtgaaatatgtgatacccctcccaaaagaacttgcaatcaaacaatattggaaaatataagaagtgatatattaggtagcaaaacaaaactgaagagcagatgtgatgaactattggagaagtttaggagatgtagacattagtgacagcttgaatggtcaggtgaggaaggtaaggagattttcaggtgggatgagctgagctggaagaatgggttaagatttgggtgatgaaggtaagagtgctcccagaaggtaaagatacagacagtggtaaggaagggtggccagccatggtgactcacacctgtaatcccagcactttgggaggccgaggtggaccaatgacttgaaccgaggagttcaagaccaaccttggcaacatagccagaccccatctctacaaaaactagccagacatagtggcacatgcctatagtcccagctactcaggaggttgaggcaagaggatcacttgatcctgggaattcaaggctgcagtgagctataattgcgactgcactccagcctgagtgacagagcaaaagtttctcaatttaaaggaaggaaggagggaaggaaggagggatggaaagaaggaaggaaggagggaaggaaagaaggaaggagggcagagtttgggggtttgggagggtgaaggcatggaaatgaaggctctggtgtcttccttggaggagcagtgaggatgctgccctagtggtagccaaggattaattgtgccaagagcatagatggtgctagaaaatcaggcgacagtagctggattatgaaggtcttcacaaagcaggcaaatgagttcagatttggtttaatagaaaataggaagtgagaaagaggtaagaaacacgatctagaatgctggccagctgtgtcacccgcgtgcctgcctgcaccagtagtgtccccgagctgggcctgacaccattctttggtgatggtggaataaaggcaagttgaagaaataaaaacatgttcatatatgtgagttcccaagacaaaccacagcagatcccaggaatgtgtttctgattgagcaatgaagacgtgttggtggggttttggttggggtgggtgtgggtgtcatctctgtttcatgaggtctaaatttctactggctcagaaaaagaactttgagcagttttttgtttatatgggtcatcatcgtcttcaatttttgtggagttttctcagagcttcttgatggtctgctaatactaaaataaatatattaggccttttgcctgtctcttcttttctgtcactgggtgatggcctttgtttcctctaatggacacattccagatttgagtgcggagcgggcagtccctggctgctcatgtctgacatcgttccctccctgtgtagcaaagggaaatcaacagcacgtgggagggggaatctgtgttctaagaactgctttggtttacacatctatagataacactcaaccagcactgcaggtcacatggaccggctggtgaggctgaggatgagtcacttttaaattactcatagagaaagaaatatgtttctgaaagccagagtggttggcttacacatggaggtaagagagaaagcaggcagcttcataaagcactcagacctcctgtgacagctgacgtggtgtgtagtgcgtcaggtgggaagacggggccctgcgtcctcagcaatgtatttggaggtgaggctttttgttgatgggaacccctgtgctgggacttgggggtatttaggatacatttccatctagctagactttctcttacagtcccactttgtaaatggccctaggacccttgattaactttcagtaacacagtctagtggtgaacaccaagccatctgaggctgaaatatggagaagtatgtcagtccaacagaaggtcagatggggaggggcgagggagctttcagaaagtcttggagtacaagggcctcagctgagcctcgaaggtcttcattcgttgcaaagaagaaggaattctgtcccaagcgagatggaaagatcatctgagcaaaaagaaagcatcagtgacagaggctgcaacttcatttcactggctgagtctaaatttttttcacaggaaaaaatatacagaagacaagagaacaatcaccaaggaagcccaaggcactgcttactaaattggtccaagggggggatttcaccaaatgcaaatgaacaaagaacaatacatgtgactcaaaatatccgttatgctcttaatacttacgagagggtgtgaggcagggaggtgaccttttcaagggttgaaagctgtcaacttttcaaccacattgttttcattgctgggagattgaagacaggatcacctcagggtaccattttggaaaagtgatttaaaaaaaattaaaaactccttcctgcataatgttttgggacattttgaattgtttttgccgtgaagacatagaattcaggtgtccaggaaatactgcaaccttttatgagaaatgaatacccagaagtctagagctgcctggcactcactctggcaggtcttccacctctggtccctctccagcagaagggctagtgagcagtttaggacccctggagcaggggtacccttacccccaccccaaaggaagcgatgtggcttttttctcgcagccccgcccccatccctttgacaggtcactagaacaacagagtgcccaagtggagacagggaggaatgtgatggttggagggacctaaaaataaccatttttccctcatcctgaatgtgctaccctgggccagacattccctgaagggctcctctgaaatctgggaaacaggaaatgctaagaaaatctctaatttgcctggtcatgtgaactcctctcggtgttgaaacagaattttggaagaggggactctgcactgtggttgagccctcctaatcagagaacatttgcccctatgagaatatggtggatgtgactattcagcctcaacttccctctttctaaacatgtaaactctgatgcctaaagaacaaaaccagaaaagaaacccactcggtcttagttgcgtatctgagtgccgacagggcggctgagaggggcccacgtgcctgtcgctaaaaagcccctttggcatttcataacaggacccaatcccgcagacttgtctgtgcaggctcacgcaccatcttcaaaacctttactacctgtatttgtagtagatgattaatgattaggctttcttcccacacatttggctttgataatctccactcaaaaatattcagatgcaaataatttaaaaacaaagtggctccaagggctctttctgggaggatggaaatgctgcatatcttgataggggagtgagttaaagggatgtatgcctttgtcaatattcataaaactgtacacatgatatattcattttgttgtatgtaaatgatactgagaatgaaaactcttaagataataaagtgggttgagtttggaaaccagaaaaagtggacacgatgtaaatgaccccgctgaaaacgattcgagttggccagcagaaactaagaaatgcgtacgcgtgggcagtccccactgtgcggggaaatctttgcaaggtgagcagattcagctcagctcatagaaactccagctgattctgcacattcatctgtgtttttgtaggtgtttttggtgtctttgtgtccatttctgtttggctcatttccctactcaattggattttgacttctatttcctgaatacaacacccccgcaatacctaatatcccaggcctgtgaaaagtgaatgcctaataaatgtccactcactcactgagatggactgcttctcctgtctctgttacattctatcaaaattagccagtgcatttggccctaaatgcatttgtaaaaatggaaagtaaaaggagaaacattcatacttgtactagttttgagaaaattcccagttatctctgcttctaaaagaaatccgtttcagaacttttacttgggaaaaattgcttttgcctaacaggaaaaataaaacatagactccagacgcagtgatgttcgtgtgaaattaagaaaacagagttaatgttgatgtcttagtggaggcgaaggtacgcttcctttctctctttttcccccttttcaaggcaaatcagaagaccgggtgtggaaattcctgcaggtttgctctgtgtcggtttgcacgtttgtagatggagtttcatgctttttctcactagtcagtctttttgtcatcatctcatcttgaaactagagaggaagggaatggaagggcaaattgctaatatcagagacctctggaaattccccttttatggtacatgagtatttaagaacagttctctttcagttgtgtttttgtgattttggtgacactcagtgggcccagccctgcctctagtcagactccagtgtccttcagcagctctctagggcatgggctggaggcagtgggatggggggttaacgtgaattgcactgctttggaaaaacagcccaagagagatcctttttttaaagtagataacctgagcataaatctatactcacatgatttttaaaaattaacttatctagcatcttttataaactgataaatctctcatgaattaatgactcaccagtgcctaaatggtgggcagacaggcggcgctataaatttctcttggcattttgtgtgtcattatatatgataagttccagtaatggcctggcttcattgaaggttattttaaaggaagaagctttttatcccacatggtttcaggcaataccttattgaagatgacttagaccttggattctggggttggaacaggcttgtgtccactgcctaaacagggccagcacagcttcgtggggggcctctggaggaaggggccccaggaaggagtcaggtctttctgctcactggctgtcaggctgcctgggggtctcggagggtccagagcaactgatggctggtgtggaggagagcgtgtgacagccagtcccaaggccaggctatgagagactatgctaattagtgaagtccctggtagggccaggtcactcggccaccaggtaaaaagtaccaggttatttctgccttggcagaaggagaaggtgcatgaatattactcattaatacgcctcaaggaaccactaggttagacaacaaaataccttctgcatccactcccctattacttcctcactccccaaacatcctttcagtctgctcctccagcttgagaaaccaggagggtcttcctaccgagtggtgcctcccgagcctctggggtacagcttgtgaccctcctcaatcaaatgaatcccagggttccaggccaggtgagtatagatggacttggagcttttcttatgaaatgtcttgagctgagtttctttttcctgctacgccgaactctgtatatgtttgtttttgttctaattttggcttcagaaaaaaaaaagaagaaaagaaaagaaaaagaatgtttgggtacagtgtaaaagttttctcagatccagattggaaactccctcatcactctgaaaccggacaggtgctgagcggtatttgtttctctgtcaataaacagcacgtacttggcctagacataaactcctgcgggagcagtggtgcacatgggcctatttcagtgtttgggaaggactgaagggccctgaattaggaggaaggtctgcttctcaccccttctcttttgatcttctgatagagaccacatagtgttctcttcatggtattttgatggcatatggcgtataaacacaggtgtgacctttacacagtgcactgcgttacaattataataagtgagaggagataaagccagctggagtttaaggttaacgctgaaaacagcgaacgctaattttcactgaaaacaatgtcacagagcaaggcgtaggtgccccttttcaactgccgcgtgcatggttctatgaacagccccaggtgaagggtttccatgaaataagccacctcctggggtacagaaatacttagtgatgcatcctctgaggatcccctttgggaccaccctcctgggcggcatatcccaaatccttgtttggatgggaagggagcattaggtaacttcacttggaacaaggtaccatgattatgtctggtcctgttttccgtgctgacaggcagttcacctctccgggactcagtgtccttgattttaaaataagggactttgaccatattccttcagtttcttgccttctggttttttacacaagaggctcagcccagaagcctaaccccagatgcatacttaattcctcgggaaaacaaaatatttgtcagacccacaattaacttaattgtttatttgtgcaaaggctttcttgtttagttccaggacttgctgttgaaatttgaaaaagggtggccccagattcatgttcacatgagtagctgcggtagctactcaccagctagctcctgggagagaaaatggagaagaaagcgagggaagaaaacggagggcaaattctccaaggtttactcctccaccagagagacgcctcctgggcaagcgtttctacctggatccctggctgcccaggaaattggggaatgagggctttgggtgtggagtccccttggccattatgaagtccatggggttgcagttactgagcagagttagaggcattcctgcacccccacccccaacccacaacgtctggacttgggaggagattccttggcttctgaaagaagcttctgtttctgtttacgtaaacatcaggtggacgggggaggtggacgccagggtgggacgttcttgcagtgctcagatgagggtgagactggaggggccagtacaggtgttgggcatttgggtagcacctaacaataatctaaggcagtggttctccatggggatgactttgccttccaggggacatttggcacggcctggagacatttcgggttttcacactagacaagggtttccgctggcatgtcgtgggcagaggccagagaagctgctaaacatcctccagtgcacagggcagcccgtcctccccacaacaaagaattacctgacccagaatgtcaattgatctaagttctaaagcctactaatagtttgtaagttgaaagcactagattgacacaaacgggaaaagttatttgcagtttattttcctgagggacaatgggctgccactcccttccatgctattgctgggcaagactctatgttggctcttgctttcttctcctctttgaacacccccctcccctgccagcccgtctgatgccgtccaagcctttttttttttttttttttggcttctcagcaagcctcatgaatattaactgggacactcagggctaaaatgatctctggtcttacttgagaaatgccctcaagcaagaaaaagaacaagagtcccaagaacaccaagtgcccctcaccttggtcacaccaatggcccacactggctggggaggcggggaagggtcctgggagagggaggatgggcctctaacctccaaggagaacatgagtgagggccccaggaagggagagggtgcgacaagcactctggagaaagaaaggagagggttcaaggtgaccctgagctcggggcaagatctgcagggcctgcaattggcagagtgcctggcatctggccaagcagccctccctctctcttccccgctccaccacctgctcctggtcgctgcattgccggttcctcccagcctcttctcacctgctcgctctaacgtccgtctcagccaacagccctactcttccctcccaagccaacagggggaagcagagagcagcagaacagcctaaaggcaacaacggcagtctctttaccgcgcccaccctgcactcctgggcccctgtggcctccaccccagcagctggaccctccgagaccctccttttcccaccaagctcacccccactaagggccctccccacgcaatgcacagcacattccacgcccacccgacatcaatcacgtcctgtctcgtgactcatccgatactgttgacttgctgtacagtttctcacctttgcaaatgagatttgtcgcctcctcaagttgactgtccctggaggccaggagacgtgctgtggccctgctgtcccgagcctttctcagagtctcatgttcagctcagttctgttgattggggacaaaggacactgccatttgccacctctgcccgccctgtgccgacctccaccagacgtttggcatcatgagcccgtgtcgttctcaccccagcctttgtggttgatgttgtagcgtcctcttattcttatagatgaataagttgaggctcagagatgttagatatcttgggtaaggtgaagctgtgacgacttgagaacataactgaacgttctaggctccttaccccacacggtgttgccattccagtcccagaaggtcctgaggttcttttgagatgtgtaatgaatccatcttccttgagcataacacaatctttatggacctgtttaaatagttttaatttccatgtgtttactcattcattctgcaaacatgcacacagcttttacaaggtgccaggcactatcagaacctgggaaaaccaagatgaagaaaatgtagccagtgcccccaaggaggagagagacaggtggcagtgagttcactggtgagccttgagggggcagaataagaaaagggcatgatggggaggtgggggcttggtcaagaaaggcttcacagaggaggtggtatttgagctgagtgtggagaggtgtgcaaaaggcagagtggcatcccagcctgaggatgcatgtgagccaggatctgtagaggaacgaggctgcagctgatgctgccagtaatcacatggagttcaaggcaagcagtgggtgtggggagaggggagtctggaagcgtgggtcagggccagctcgccctgtggataacaggagccactcagggcatttggataagagagagggacgcaactgctttgtgggtctagcagacaccctgggaatactccagagggaagctgaatggggcaagatgagggaagatcggttgggagcttcttgccactgtctaggtaagccatgcagtggggtgaacagaagtggcttctgtaagaccagaaagaggagacatcctaagagacttctgtaaggtggagatgacagtgatggtgtgtccataggaaaagaagagggaggagttgaggatcaccccggtttttctgctaggatataggctgagggctgtcaagggggctgattagacccttagaggcagattttgggaaggtgtaatcagttccctttgtgctgtgttgggtttgatgtacctgatggatatgcagatctgtttggtcgcaaactagggtttgaggttcaaaagagattcaagagtcatgagcctaaaggcttcacaatagggttatagcttaatcctttctgtactatgaagacttcatgaatgtcccaaaatccacattcaggcctgcccttcccagagtcatcattgtcttctagaagcctagtttgtcccatttcagctgccctcctctggactcaccactggctttttggagtggccaggtctgtgtagagaattctgaatggaccattccaggtggggacctcatggcttagtacaaggtccgatgttcttgctgttgggtaggaaatcctgccttgatgagtctcaggatttggctggccgctctgccctgacgatttcaagaaatcacttctgctaactccagaactctacttccaggcccctagctgataatatacaggtattgagcttcatttgaattttttctttaagaacttaccttgactaaagatgttagaaaataagatcctaaaattaaaaattacggactctgcaaaaagagcttaactggcttcaaaagtttcacacaactcctttcatatatgcattttctgtaagctacttgtaaataaagaaggtacctaggaaaggaaaattgccatctctgacagttcaatgcaaaaatgagagaggaatgagagggagtcatgactgaattttagtgcctttgctgccaggcacttcacagaagtcatttcatcctcctgaccactcgacaactacagccttttatttttctctgttttatgaattcataaatttaggctcagggaggttaaataactcatctaacatgagttagatttaagcattgcagagaacgagaggagaactgataactcattcaactcattgacgaatctagtaatttgcagagttgaggttcaagcacagatctgtctgactctaatgtgtgtgctctttcctctccaatgctactagcatgggtgagctgtgagcattctggagagggtgaaaagtgggaggcagaggcaaaagctgagtcaaatagttttctcagatgagagagagtgggcaggcagtggatattcgtgcaagcaagttggacgccgtcagaaatctgagctgaagttatgtgggtatactcacgtcttgtagtctccgctgaaggacccattatcaaataggtggaaaatacaaaaattgaagatatggtgaagcattatcacctgatcaacccagcatcctgctctcataggtggtgtacaatttcacccagcccaagtcattatgtcttccaggagaaaaggaggctctagtaggcactgaggacaagcacatgataagctattgttttgcctcctgggaatacttggttggccctttattttttagtagcaagaagatttaggagtagcactctgtatgtatgttgattgtttggctttgtacacaaatgttagaaaattaaagaatagatttggtcattgtcatgtctgtttgccctcaccagacttgacttagatatggttctttaaagtctcaggcattttagaataactttggggaaggtatttacgaattaatttttaaaaaaactctttcattttagaattttcttaaaagagatatgtttttaaaatttcaaatacctagaattgggcaaacgaggtgttgccaagtagaggctctgctgagcaaataatgaccacatcaaaacaccagccccaaggaagcaggctccgattctgctcccagagcagcacattggtgtggtgtcaaatgcatgtttctaaagaactcaaacattgttttctcttagttagataaacaaactccttgatgtctatttatgactagttgttagtgagtctcttggaagtcatacaaagcagtgagaacaagaaggtgttttgcaggttggctttgagtaaagaccctctgttttgatcagggtcttggatgccctgctcaatcccctactcgaagttctgagggcatttctctgattgtcctccaaaactgtcctgccaactgctatagattaaataggtaaggagcagctactaagtttccttcttccctcccatgaaggagcccggccatgagatttagccaatgagcccatttaactctctgttttctagctcatttatccaagggttcagtgcaccactggaaaccttcatataacagaaagccagtgtttggggggcatttggtttcaacttgcttgtgtttgagcatttatatttataatagtgctaatctctaagggactcacatcgcattaagagctttatcttaggctgccacggaaactagcatgtaccaacatgactgagaactatgagaaattgggctgggcctacagaaaattaataagctccgattttcatttaaattatcttttccatgagattttgttttgaaacccacaaagtcgggccaagccattagcattccctatgcacacatttatcctccccctgtagcctatgctgtcccctcccctcgcccccagcccctcatctgttatcgccccccatctattatcgccccccttgcctgagtgaactcgcccttctctgaaccgtcatggccaccccttctgccaccaggacattcttgcttgtattgcttgctcctgacctcatagaaggaaaggagtagttgcatttttctcttgaatccaccccagggttttgatcatgccagtcatgttacagatgcccagtaatttctgctgggttagatgttagtcagttgcagggtagattggtgttaggggaggtagcccggccataggcaaaaaagtagcttagggtcaccgcagtcagtgtggagaagggaattttggggggaaatctggacagacgaatttgaccaatctatgaggctaattatagaaaaaaacacaagaagggggaaaatttctttcagtaattagagagatgacagagaagcagggaatgcccctgattgcattatagaagaggagatcaagatgacttcagaagtcatttgctgaaggtacaaagagagctcaaggtgaaaggagtcccattttccttcttggtggaggcgcagcttagtaacctttgaggagtgttgcctgtcttgctaggaaaaatatgacaggagtagcccagtggaggttggagacctaataccccttctcacccccaaacctgataactcattcttaagcatcaaatcttatgttatagtccaatatttctggacatttttctgccacaaggtctccagaatgtgttagcttagcttcagccttataggaattcatatttaaatcgacttcttttttcctacctggagactgctggaatatcagactaaaacagctcacgggaaggctgagcagagtctaattctagaacttgtggcatgttcatgggacacggaaaatacatagaagtgatggtttcacagagaaagggaaaagtcactccagagaaaactggagggagccaagaaaatgcggagagaaagtggggaatggcaacctcagacgcagagggaaagaaaaacaagagaagacgtacgttagcaataaaagaaaaaaaaccatcacaatgcccgttgggcaggaaagtgatttttctgcttttctttcagccctcctgggcccacagtattgaagataggagcagagtgcattcactggtgtccactcttcagctgggtgttgctgaagaagagagaaaccttagccatcttgccaccaggtcactctctttctttcgttttcaggctgacccaagcaaaataggggaaaattgcatctggacaaaggaaacttctctttctgtacctaaaagcctcatgtcaggctgggcgcggtggctcacgcctgtaatcccagcactatgggaggctgagtcaggaggatcacttgaggtcaggagtttcaggccagcctggccaacatggtgaaaccccaattctacaaaaaaactacaaaaattagccaggcatggcggtgggtgcctgtaatcccagccattcgggaagactgaggcaggagaattgcttgaacctgggaggcagaggctgcagtgagccgagatcgcaccactgcactccagcctgggtaactgacagagggagacgctgtctcaaaataaataaataaataaataaataaataaataaataaataaataaatgcctcatgtcaggagaaccctttctgtagagagccatataattaagcactgtgtttgttccaaacaaaaactagagaaagggttaaaaatcaatattattagtgacatctcctctcttcttcactgttaatcatctgccggtcactgtcataacagtgttatttttcaggcctgaaatgaaaattggcgattacatcaagcaaagagtttgaaaggaaggctgggttactgcatgattattcggactctccctgtaaatacgtgaatagttccagcttcccctcacatgggttgagggtaacagaatgacatctccctgggctagaagagaaacagagacagaacaagcgaaagtcgtctggcaccagccaacagttgcaacttatacatatagcccgggaccggtatgggtctgtggcctgttaggaacagggccgcacagcaggaggtgagcagctggcgagcatcactgcctgagctccggctcctgtcagatcagtggcgacattaggttttcctaggagtgcaaaccctattgtgaactgtgcccacaagggatctaggttgtgtgctccttatgggaaccgaatgcctgatgatctgtgttggaacagtttcatcctgaaatgatcccccaccccattcgtggaaaaattgtcctccacaaaacacgtccctggtgccaaaaaggttgtggactgctgacataaatgagcttgattcttttctcataatgtaaacgttatcaaagagacagaggtgtcagcataagcacgtcgctgctccatgcacacttatgacttcgtggctctgggcaggcccgtttagctgggagtcatagctacatttagggaggccgcgtgattgagtggaaaggcaggatattttatgtcagaattctgggtttgagttctggtttcataattgattaactaggtgtccttggaaaagttacgtattcttggtcatctctaaaagaggggtgacagcagtaataacttatctgtggcttgttgggaggaccacactagatgatctatatggaagcactttctcaacaacagcgtgccatgtgaatatttgtttttgtttgtaatagatacctctataataaggagaatgagaaggttattatttcatcctgtttgttcactgtttttatttaacaactttttttttttttcctactacattccaggcagcaggccagaggccagggaaattcgttgccacttcacagtatctcattgcatcattgagaggtttactcctgatccagcaccgaaagaccatttttggcctttaaaaataaagttgaaagtccaagagccagaaagattaaggattaagctaatttttaaaataacaaatgttttcttatattcttttctcatttatatggtgctggtaattttttaaattagattttcatctgggcattttatattaaaaatgatacagttccctgtcccttgtaattgcatttcttttgattttcttttattatgactcgcatatcactgacacttttttcctggaatgttaaaagtatacatcatctggctaaaaggaaaaaatactgacttaataaaaatggaaaagagagagagagagaaaatggatattcttctcttttggttccaaacaaggcaaagtcctcattcctcgttcttcatacatgccaaggttgatgtcacggatccaaaccagttttgagttatctgaaatgggggggagcggggaagcgcagttcaacaatcttctgaagcttgaaaaacaaatttgtcacagtctgataacccaaaaatgactgatggattttctctgcattttccaagcagggaggggtcgggcatggagaatgaaacattctgagaaaagacttaaatgtggaaacttttggttcaagagggtattctaggagatacaagaaatatctcctgggggcatccaaagggaataacactgtaatcttgagtgatgtatggttccattgcccgaggaatagggatgaaaaccataaactcctttggttggggtattaacttatcatcaaaagttaccataaataatggatattgtttatggctgagaagtaggacacatccagagaagacatcccttaatttttcataaaatcatctcagtgttattggaatatgtttttcatgccatttgagctgtcggagtatctcttgggtagattcttaagcagaaatagttgggactttacaaaccctgcctgggattctaatgtctggtgccatgaagattttggcttgtgtttcttttgatgtctagaatatcaagaacattcctagcttctatattacggcaggtcacgtcccggcttcttctagtaaaatcccctctaggattcaagcctctatttgcaccggtaataaatgtgatggcacattgcgactttgaatgcaagccagcagggctgcaggcacctgtttctcccagtgccccaactgtatcaaacccttttcatcctccctgcttttgatgcacaaacataaaacggagtcccagaatctaaaagtgatgtcacttgagtgtcaccaaggacctttagaggaccatggggcatctcttcctgttacaaatgaggctctcaaagcctggaaaggtgaatccctggaccacaagtggaggaactgagaaagggtgcgtcgacactcagaccccacagcttgccattgtgtggcttgtgatagaaccaagacatcagaacagaccagcttatccggttataaatctaggataacatgatgagcttcagagccaggggttgagctctcctgggactcctcccctccaaaggatgtgttccattgccaaacattaaaagctccgaattcttgttttctcgccaaaaggtattgtagacatgatggcagtgaaattatttttttcgcatttaaagttacccttaataaaatcactttcttcaggtggtgtaccaagttagtaaaacatacctgtttgaatctatattccatcaaccatgaacttatgcctggggatcaaaaatttcttaaaacccaccaggcgtgatcctaatacttttttcacagtttctcggggtgtttcagtaggttaggattacctccaaagacatttaaatgatgtttctggttcaaacggaaatgaaaagcacataaaattgtaagacataagaattccaagaatttggcagaggtgaaaacacacaaagaaaagatgaaatttagacgtttttattctgctcctttatccaacacaaatccctctccagttgtcccataaccacaatgccagcatttaactcctcaagggttaaaggaggcttgtagagcgggcctctggctgactccagcgtggatcgcaggcctggcgtcctgtcagacttccacggtcaaatggtaaccacactgcctctagttacctcgctccatttcttggggggctcagggacagccgccatttccccatcagtgtccacgaccagcgtccttctgccaggaggcgggctggaaggtccctcgcagctatggccaagccctggctgcggctgcagaagtctcacttgtttcactcggccaacacttaatttctttatgtatctgagggagtggggaattagtgtcttccaggaaattcaggctctgagttttctgtcctagactacaacaggcaaatggagaacgggttgtggggatcggagctgaggaatgaacttcagctgataaaatgcaagacaaggagggaacaggaaagcaaaggacaaagtgaaggagaaaaaaataaagggaattttggcagggaaaagggatttgggagataggacgggagtcctgtctgggttatagtgaaggcaggggagagaggtttgggggatcttggggacctgggccgtgtccagccattttttgtctcccaccaactcctcgctgttcagctaccccacagagcagggtcttgggcatcctgtgtgctgaggacagagctgagcttatagtcactgtgcatgaaggatgctgtgattctgcttttttgtttgttcatctttaatttggtgtattagagatgttgcactgaacacattccctctcagcatgcaactgccaaaatgctgaaagaaagtgtttggcttgttgggtctgactgcaacaatcacaaacttgccttgcaaacttctggccttccagtaacacatcgaacattaaaggattaaatgcttggtgagcagagctaggttcttgtaaaacacttggcaggtaggttcctaggaatttaaaggtatctgcctttgttaaattatgaagattttttaaatgtgagtagagaaaagctgtttccagtcatgaggagtcacgaggggtgcctccaggaggagagagaccatgcaagaagcaggtgacggggcagtggggcgagcggcccagagaagcccccccaccccctggatctcttgggcagtggggcgagtggccagggaagccccctgtatccccctgggtctcttctttgagggcttatgctctgtccgtggtgtggagccactcttgttcatgcacgttgcagacacaaccacttttggtccagcaagaatagttgagctgatcacttgaaaggatcaaaatccagttgccactgtggaagctctggggccacatattttaatattctaaattaggcctcaagttggatttgtttttgtgactcaaggaaattttgttctctttcacattctagaattccctgtgaagcagccctgtaaataggagggcttttcctgaataatatggaaagaatttctctttggggatttgagtctatatcatacaacattttaaaatactcttgagatggcacgtgcagccctagcaacagggccagaccacagtcaagggcttccagagtgtgccgcacacgttcccgtgggatccagccttgcacagtgcccagggcggcgggggcgggggtgatggggaaggtcctgtgactggtggtttctccatggtcacagggtcttctttctgttgatgtggccccattcgctctgactcacccctgacggcatacaccggcttgctttaggacccaccagggtggccccaaactcccatgccacttccttgccctgaaacaccatccttggttttcttgcttttatttgaagtcctgaggcctcagctcctgtctcactttctgtccgccttccagcccatcttaaacactcttggtacatttcttgagcgttccctgtcactcctcgggacttcctgtttagcctctcatatttattgctccgggggagccggagttggatcttgtatgtcttttctgcttcctttgggagaagcaaaatatagttgaaaaggtacatgcctggcagtcatatagtcctggattcgaaccccggctttgctgcaatgagctgagtgactttgagcaagttgtgtgacctttctgatggcagtctcttctgtctagagttgtttgtaaaagccaccttaatgggctttggcaccacagttaaatatctcttgtcatcccagatttagtgcctagccagaagtagatgctaaataaatactttttaaagtggtttgcctatggttggattgctcgattcagatatgtccaaaagatagatcaaagctagaggaaagaaagagctaaaacgagctatccaaagttagcgccaattatactatgaaaaacatgttgcctgtggatccaagattggccaaggggtttcctcagtggaaatagcaatttgcttgacctaaaatttctcttgaagccttcaccagcccaaacttgagcttattcctacgaccttaggtgtgcatatctctgagtcatcccattggaagagcgtttactgagtacctgatttgggtgatgagcatgatgtcctgccttaaggagctcattgtcatggagtcaagctcactatctcccctgcagcactctgcacaatgctgtgtgcaactcaggcggtcagtaaatgtttgcatccctgaatgcaacctgagccaactcgctccaaggtttctgcaatggcagcaaggttctgccagtgctacacatgcataggcatggccactgaccactcagctgccagtcccacctggaatattctggctctgccatttttgcctgaggaatagtcggtgtataaaggccccgtagcacagttcaaattccatttgcaatgcagccagcacatacttgcatcccttctgcaggcagggtcccccaggctcgccgctgcaagctgcaaaagtgtctgaccggtcctgagcgtttgacgggaagtgacagttgccttggaagtggatctcccaggggcacgacttttctcgtgttaagtgcccactgctgacaatgctgacaggccttgtacagtgggcacgtgtagtgttctgaccttgctcctgcccccaggaggccagcttcactggcttcactgtgagagcgtgtccttgggtcaggtcagccagctgtcaactgtgcccctgtaggttgtgctgatggaagatatttcagcccctccactcacttaaaactcatccatgattgctttcagcttctctttttctctttctctttgtctttctgggtctctgggtctcccgtttctctctctgagtttctgtttttgcttctctctctagttctatatacagcagtatccttcttgcaacagaaagcatactgtcagaggtccttcgccgtaaacagctattcagatgagaggccacgccagcgtatcttgtccatatgttaatgagccaggatccagaaccacaggctgacctggcccaccatttacctgtcctggtactaacagctgctgccactgacagagactgcattttccttgtgatagagaggtctgctgtcttccctgggcacaggaagactgtctgatgaggaaggaagaggattgtcaaagagccaagcagtgttccttgaaatgcatctggttttattcatgttgagtctttccaggtgaactgaactaaatcataaactacaaaatgaaagcagatttttcttagcatgcccatatggagctcactgaggagttcaccaccatccgtcagctccccttgtcccccagagcacagaggatgtaattgttcttctcttcctgatcggtagattgatggtgtggataagaagcctctcccatgggcttctcagaggatcatcgcagtcactttgacggtcacagaatgacccattgagctgcagaactggggagctgggatctgagtaagactattatacgttggggtgcttttgagtgggatgtaagcaggctgtgaagtttcagccatttgtgacttacctgccccaaaccaagaacaacagaaccagcaccatccggggtgcatctggtcctcgacagatgtctgggcctgcggtaggtcatcagggctccctggagctaatgcagtgtggagcttccagaaaagatgcccaggctgatttcttaaccagtcccaaaaagcaagtgccagacaaggcagggctggaggctggcagtgcccagctggctgaggatgccgcatcctccagcctagtctgctttgctctttttcttctacataccctcctccaggtctgaggccactttcagcaaattcctattaggacatgcaggttctttgtactccccacaccaccagcctcagtcaacacttactgatttaaacaagtgaaaaccaaacatttggcccctaactctggccctccacgtttaataaatgaaggactccctcccctcactgcccccagcagcgatgtcctgatgacagcgattaggccaagctgcagaacttaacaagcatctgctttcagttcccatttttggcgtattttcatgaattaactcttgcagtgacaaaaatagagggaggcagcctgggccatgccccgtgttcacgagtcacatggcaggtacaggagccacggcacgcttggcccaaatcatgaccgacaagtagagcatatttgcctgtcgccaatccctgtggagcacacagtgattatgttctactcacatacggagacaggtatggacagtggcgtggggtggggaggagagccacatgtgtggctccagatcccaagaaaaaagagttggtggatctattccaaacgccagtctgcctgtggaatccccagcccctgtcaggcagtggagagtcctgttcggtattgaatataatcagagcttcccacctgctccctactttaagccacactgatgtcaccagttctaattaaaactggcatgagaggcagagggctttgtgggcatatgggggttggggtctgggacaaataacttggattatgctcataaaagcaaagagattggaagcacagaggcacatcagaggtcacagcttcagtgctgtgccaagaaaggcctcctcctaactcacagcaggagggtctgaggccaggtggggagaagagcagtggagaagtggcggatggaagagatggaccacacagagaggaagcaggagatcctctgcaatagttacagtaacacagctctggcacgcaccaacagaacccaagtcacatcctcaaggatgcacgagaaagggtgaagaataaggtcactaactaggtaagcccagatggtagagcggagagagacttcttagaggttcgctacggcggagttttcagatgaggaaaattgaaggtcccaggggtgaagtgagctgctcaccttacaagtaggagtgccccgattgctgctcatgcatccgacccctaacttctcatccagaacacaaaccatgccacctcctactacagttcttcctttttttcttttggagaatgacagtggtgcacattttctaaccagcagcgtctcattcctcattacacttgtgagccgaggatccatcacaagccagtacttctgtggaattccatatggtataaaaatagtttagtccctcttcatgtcgtgtaaggaacataattaagctcttttattgggatatagttcacgtgccataaaattccatttaaagtgatcagcgcattggtttttagcatattcaaaaggttatacagccatcacccttagctaattccagaacttttccatcactccaaaaagaagccctgtacccattagcaatgactccctagtctccccgtctccccatctcctgggaacctctaatccactttttgtcttgatggccttgcctattttggacattgcatgtcaatggactcatagacagtgggtggcctttgtgcctggatccttcacttggcctcatgtttttgagggtcatccatgttgttgcatgtgtcaatgcttcgctcctttttttggctgagttgtaagattccattatgtgggtagaccacattttgtttatttgttcatcagttagtggatatttgggtcatttccacttttggctattatgaataatgctgatgtgaacatttgtgtacaagttttcgtgtgaacgtgcaatttcaattcctttgggtgtactaggagttgaattgctgggtcatgtggtgactctgtttaactctttgaggaatcagcaaactgttttcccacaatggctgcaccagtttacattcccaccagtcatgtgcaggggtttcaatttctcaacatccttgccaacacttgttattatctatttttaaaattagagccactctagtggatgtgatctctccttgtggtttcgatttgcatttccctaatgactaatgatagtgaagcatctcttcatgcacttactggccatttgtgtaccttcactggtaaaatgtctaccagaatcctttggccttttttaaaatttagctacttacgtttttattgttgagttataataattaagttttttgctggacatattttcatgtccaacacaatatcataaaagtgttaagtttgtcactttatgcttgatacttccccccgaaacagtgaaatagcataagcccaaaacaagagagggctgagcaccacaacaggcagggccctcggaagctctagccaaaagaaggtaatggaatgaggaaggtaggaagaaaaatgaagaaacttcgttttaaagccaaaacactggaaagcaggtgactgaggcctgtgtgtatataggccctttctttagggcctcttcaggtgtgccttaaaatgaggacaggagcatgggcctgttctctcctggcaaggccactgctgggcaaatgggcctgcagacaagacacaaagtgctttgaattcagtactaagaaaattatcaggcccatggaagccactgggaatattaccaagcagttactatagggcagggcatgtgtcttatttagctttaagctaaatactcagcaccttacaaaaatagtttggttactgaatgaataagcccgctgaagatgagatttcaaggtcatatagatacggcctttagtctctcttgttatggtttattacactaacctggtgaaccaaatagcataactattaacatatttttagcactttttgctataaatgcatttctccacctatttcagaagtacgtcttttgaattactggactgaccacaccttcttgcaggagggacatgagcccacaggtgccctgcagtatttgcatagctagtgcggcagtagggaacttggttctgtgcttccctccagacaccatcttctaccccagcccagaaggtaattagactaaggaatcctctgaggtccatctctggaatagccagctccggctgaagtctccattagcaggtggttggggccaagcttcctctgccctggcccatggcataagccatctttgcacattattttcaaactgtgaaaataatgccagagaaaggaagcacccatttgggcttctcatttttcagcctccccagctcctgagggcccctgcctgatttgcattcttagctaaatttgcataacagaacacaccagaacttccctggaccaactgtggtaagcgggcaagttttgtttttgttttgtttgggtttttcatctcctgccatgtctccagcaggtttcttgttacatccaaatgacatggagattaggtttcacgaatgtcattggcccatgtttcaaccagcccctccccctggacccagagttcctccaagatcaacccccaggcactggagatggctttggggagcagccttcgccagcctggaggaaggcaaatccttgtgcttctcacgctcccgtgcctcttcaccatctccggcccaggcagctgtgtgtccttcagttatatgctcaagggttatttttttccctttccttttcccccaaacccggaaacaatattttgggagtaaagggagggtgcgggaggaagagtcacaggggacagaagcaagcatgcagctgccaaagccacactgctctgcagacggaaccctctagactcattcagcacaatgtggctgtggaggaaatcctgccgagccgatgataaggggggaaatggagtcacttcctcaccagctgctttattcaggtagaaaaaagtcctcacttccttgcgtgtgctctgccggccaccactcccagccgccagtgcggcttgctccccctcttgctctgagccaactctggtgtcaggagaatcttgcttggcttcatggagcgctctttctgcaagacaagtgtctgtctaccccacttcctccttcatgtcctttctctttctcctggcgttctctctcacctgacggttgcatgtcatagattctgtgtggccgcagtagtcacagatagtattgccaatgagtctccagccctcttggtggaatctaggatcaggacatacccagtggtctctacgtttgcatagatgtctagaaacagcctttgacctctggtcgtctcccctgccctgcaccacaggcaccaatgctgcccctcttgccaatgccctgctattgtcctttcaccctcttaggcagcacttgtcaaagtttgtcttcctaatactccaaacatagcagcagtctccttgacagaggggttaggggccaaatgagtttggaaaatgctactccctttcttggagaatcaagcacctgtgagtgggggtgataatatttactaaccaatatagcagggacactgaccagtcagatccctctgtgtccttgggaaccggctaaccatcagtccctgggaggaggacactagaggctgctgctgaaagaaaaaaaaagcactgaattttatctaagccagtcctttatttggtctctgaatactccccttttaaaaaaatattatctattaggatgtttgaaaaatctgccatatagtaaaacaaatcagtttgtttcagctccacaaacatttgctgagttcctaacgtatgacagacacatgctccagggatccaaagataaataaaacatggtcctgcacctccaggtgctaatagttgaatggggaaggcagacatgtaaacagatgatcttcgtataatactgtgaacagggaacagccgaggattatttagctcaacctagggatttggagaaagttgcttgcagaaaatgattgagctgaatctctgaatgaaccaaagttgacttaagagtgacaagctgagcaggagaactaggttggagccagagcattgggaaccttagacttaagcatggaagcaacagatttgattctgaatggatcactctggctgcagtacacagaagagatttacaggcaaagcacaagactcagacagaggcagagagatcagactggaaatcacagcagtgatcctggggagagaaggtaaagggagagagaagtgttcaggtggtaaaattggcagtgcatctactgccctgttctgtcctgtcccctggcctttaccacttcagtgctcactaacttcacctccagctataagagatgtggcatctgtatctatttccttgattggtacttcacctgtgacatggccagctaggagtgctggggtattgacattccataggagcaaccttcaaccaatgaatagcaggagttggtgtataaataccccagctccctagtccctcagtgggttaacaagagatgcatggtctacaccggccctcagatttccctggcaggagtaagctctgtttgccggtagcaataacttgcttgatgaggtaactcatgcatgagtcttttcctttttttctctcccttccctgctccccttagagttcctagcatcatctcccaaataaaccacttgcactcaaatctttgtcttagggtctgtttctaagggagtctaacctatggccatgggatttactgttgaatgaatatggggcatgaggaagagaaaaacatctaggagactctgaggctgtaggtttacttgatgccatagccaggttgaagacaggaagagagggaggcttgatggagggagtgatgatagcttgagtttggggcaggttgatcgaactccctaggggatgtcttagaaagcaattggaataagtatttgccagttaggggagaaagtgagactggatataaagatgttaggaacattatcataggggtggtatataagaccaagagagtgaaagagattggtcaaagagagaaaagaaaatgtccagacagaagcctgatgggcagcatcgagaacttatcagaataggccagggaggaggtgcccctgagggagacagagaggaaattcttcaggaggaaggaggtagcccaaagggagcagagtcacggaagaccctcagtggtcttggtgtccggggcatcagagcacctactaagatacaacctcacacccagtgaatttagccacatggagggtattggtggtctctgtgggggtggtttcagaggcacagtataggaagaagccagactgaatgggttcaaatgtgggtgggaagtgagccaatgagtgtggcttggcagcttttctaggagggcagagacagagaagataatggttagggtggagcacgcatcagcacagacattttgaggatacctgaggtcagaaaggaaggatgcgattgaaattgtaattgagagcagggacaattgacggaggaaggttcctgaagcaatgggagatggtggaatcagggtgaagtgtggagaggagcagggaaggacaggcagaaatggacatttgtgcatgggccagggtggaaagctgtggtaattcttgcccaatgatcccagttttctcagagaagtaaaaggcagtgttcactgccaaaaggtgaggaagatgtgtgagacaagtggtggctgttgggaacagtcatcaaaaggaacagaaaagatctgacaaagaataaagaattgctaggtggtgtcagaactcactgagtttagagaccatgaatttccagcagcacctgcctgcaaggttgggtaactttcttcagcaccacttggaagcccagatgagacttgttttgggctggagtccaagttggggcagagaggaaggtcgggatgggaggaagcaagttgagggaggcagggaggaggttccctgggtagagagaagaaccagctgcttgccagcattctaaccagtgacatgcaggaggcaggtgaaacccagccttcacgctcctgtccaccacgaatttccttatgaatacacactgtaaggaatttgctttacctgtcaaagtttcactcacctcacctatttaaaaaaagagctaatatctttattagacattattaaaccaattcagggaatctgaacatactttgaggttccttccagcccagagttttctgttacagtgattctccctttccttttttcttcctaaccctaaagttgtcatgagagaagagatccccagaggtccccatggagacaaaattataaactcatgaaaaatagaaaatatcaaagtcattcgatagctgtgtttgatttcccattggcatggtctgattttctttttactttcttcttactgccgatgagactctgcagtctgcaggaacaaaatggcggcacccattgatttagtttagttcaaatgtgcacatagaggcattacctctctctagagtgtaagctctttggggacagggtggcttttctcccttagaattcccttcgattgtataacgtctgcatgcatagtcagctcaaagactgtggaatgtagctgaatttcgaatttgcttatagccagccaagccatattaaatttccccagtatatagagagctgagaacacacactgagctcggggcctgaacctcttattgcaggcattggtctgaggggcagagctcatgagagttcttctgggccagggtctaaggaggccctcacttaaccgggggcctgttgcatggttctaggtcatggctgctgcctgggagcccatgtctccccactactagacatcatctcccagcatttttgtctgtcaaattatggagtctggatttttttcagattaagtaagcacttagaatgtaacattattctatgtagtatatattgaaatatatttcataaatagtaatatacatgtttgtattgaattagaaaagacagctaaggaaaaaaatcagaatagcctcttaaatgccatgtcctcatgcctacttctgccttcaacgataatcactgttaacatctttgcgttttcctttatattatttttttctgtttgtaaacgcgcacatgtatatgttaggtttttacagaagtggaatcgtgttttgctgaccgttttgtcctgctttactcaatatgaccttaggaacacaatttcttgccaataactatagggtatgacttttaatgctgaacagcactccatcatgtggacgcgctgtcagtcatctattttcagacatttgtttccaggtttatgctattatacataatctgtgcactttattatttttccaaaataaataactggaagtgaaattactaacaaaagctttttaaaagccttttgatatgcattaccaaattcaaaaggtctccatgtttacctttacctgggcataagggttattttgggacccccgcccatatccccaaccgcatgccattcttttcagcacttagaattaaccttctcttccattcttgacaatctgaccttttttaaaaaaaattctcattttaggtttacgtgaaatttctcgaagtggaccaggggtggtggctcatgcctgtaatcccagcactttgggaggccaaggtgggaggatcacttgaggccaggagtttgaatccagcctggccaacatgaaaccctttctctactaaaaatacaaaaattagccgggcgtagtagagggtacctgtagtcccagttacacgggaggctgaggcagaagaattgcttgaacctgggagccactgcactccagcctgagtgacagtggctccatctcaaaaaaaaaaaaaaaaaaaaattcttgaaggttctgaacggaaaaggaaaatgttggaggatggctgcctcccaggtgggagtgctccatggcccggaggggtgaggacacctttgctgagtttaggagtcttgaccctggtctgttcccgtccacacctacctggcctggttccaaacctgcagcaaggctgcggctgggagtttagccatcctgtccccttgggccagccctgggtggaactcagatcctctgtggcctctgaattggaaatttatggggaagccactgtggacagagccaccagagctgaggccctgcccatctcctcctcataggaggagccggtgccagcctttccgtgtgaacctgtgatccgtgaagtcgggtaagcccttgccagtcctgacatgagcaagggacacagagcttcctaaatatatagactgggattttgtccgaatcacatgacgacccaggttttctttttccctctttgttgcttttaatacataaaatgagcatgtgtttatttaaaacagctttcaaactcaaacaaataatgacagactgttcaaacagacttcggaaatcgccccaatcaggatgtttgaaaaatcaggaagactttctacgaaagaagctttcaggtcattttagtcccgaagccgcagggtctcctttgcactttggaattgtagaagggcaaagtttagaggccagctccaacctccagggggttaaatgacttgccctctagccctacactctaataatgtgtaaagaaggacagataggtaggcattgtattatcacttcccatctttgaccagaacacgggatgtatacattttaattcataattcctatagaaattacggactatcctcagatcagaaagctaagagaggaaattgcttctgcaaaacggcaggctcagcagaacttcttgggggaagggcaggttgagtaggtgcggagcaggtctgcaagaggacagacaagagcaaggtgtttgttctgccacgagctcactttctgtatccaatttacaaatggctttgagtgacctacgttaatcttcacaataatgaattttatggctatggatgaagtaaatgaggctcggggctgggttatctgctgaaggttataaactaataaaatatcaaagccagggttcacccacactcctcctccaagtcccatgcccttctcagccccctgggatggcaacagcatctctatgctgaggctttgggccaagagctgctagtttagctcatctcactctagaaatgacattgttctacgtaatgcatatcagaaatggcctgttaggttcatgagaagcactgttatttgtgtgggggtgagggtggtgagagggaattattccagctctgaggaggtggggatatttgggacagcatttcttctgctctccagcactgtgtgccagaccaactgggagaaaatgccagctggagtatgtccctgcatcctccggtttcccaggatggcttcaggtccagacaggacaaatgatcaggggcttagtctggttcagattttgccacacaaaactctgttgattactaaagggattcagagcccggccactgaccttctcaatgtcaagccaaattgcagacaacctattgccagtgccctgacaaatttggggtgtcttttggctgggctattgggggtttcagcctacccatccctcagagagagaagcatggatgggaggactagttgacatttgcagccgtgtctgtgatgtcttgggttgctccctggaagaggcagagttctggcttgtggagaagtcctgactccttcctgccccactgatccctgcttatatggagaggggtgtgcatcttggcagacaatcatgattgtgccttagctctgtgctaagagcactaaacacacattttatgtacgtctattgcctcgcttttctaacactgaaatttagaaatgtttaacaatagatatttaaaaagaagaagaaagcccttgcgccctctcctggtaaaagttaaccaaggacctccaaagatgcagaaggcccactgggttagcagtcgctggtctgggctagctgattgtgctgatttgaccaatgctgttgacacacaggatgggtcatctgttcttctatggtctgtgattacagagcatcttataaaccagagtttctcagcctcggccctgttagcattggggggctgccctgtgcattgtgggatgttgaacagcatccgcggcctctgcccactagataccagtagcaccctcaccccaaatcatgaccactaaaaatgcttccaaacattgccaaatgtcccctgggggacaggatcactctcagtgtgaccctcgccctaaattcttgcctgccttttgtaaaaggtggcattggttggagggcaatccatgagaatgtgaggatggctcaaggcaagcccttcatgatgtctggaagcaatattgatgactggttaactgaggtcacttctaggagtttgtttcaaaaaagcaactgaacaaatagacaagaatttatatacaaaaatatatcatgatattgtttataatagcaaaagttttaaacactataaacatgaattttttaaagtatggcacattttatatatcatgaaaataattgtataaatctatatttaataatgtggaaagttaccctaacaatgctttaaatcctcatcaagactacctcaggattctcagaggctgttacatatagaaggagtaatttcaaacagattcataagcatttgggtaaagcattaagccaaagaccaatgattgtattcagaaagcttaagtgaacaaacatttactacgcacctatagtgcaccacaaccatgcccagcatgagggagacaaagagaatccctggtcccactgctacagcccttgccccagagaaagggaacccctctgtgcactgttggagcccctcccaacagcgatgtccagggtcatggtatgttactgtttcctgtaataaaactgtgtgctttgagtcagggttgttgggaataatgtgaaactattcttgttttcttcttcatcctgaataaatcagaagtaaaaagaattcatttactgatttatatattcaaatattcattcagaaagttgtccaaatactcattggacccaaatgtgaaacataatctccccaaaatctaggaaatgagcaattggtgatttgctcaatccaagcccatccagagggtagactttgctacaacacactacagacccgacttgagatggagagataggaatggaagggagacactttttgtctctcagggacctgcacatccagtgacacacccctgatctcctgccttgtgagatccacaatttgagtaaatgcagagttgtggtcgtccagtctagccacccccaagagaaaccccctgacagctccctttccccaggagaaccttgaccttagaggttggcactgcaccagtcaaggccgcccttggcccctccactgactgagcccttgactgaccaaatgctctcatagagctgccgttagccacgccagggcatcagcagagagaagggtgctggtttctatctgggttcaaagcctggctctgccacttgttaaaaagtctcttattccctgcgattctcagctttttcatcttcagaacagaaacaaataaaataacttcataagattggtacaaagaattagctggatgagaaagcgcatgcctttaatcccagaactttgggaggctgaggcaggagactcacttgagcccaggagttcaagaccagcctggaaagtatagtaagaccctatctctacaaaaaatttaaaaattagccaagcatggtaatcctaggtactcaggaggcggaggcaggaggatcactcttgagtccaacagttcgaggctgcagtgggtcatgattgcaccactgcactgcagcctgggcaacagagcaagactcttgtctctaaaaaaaaaaaaagaaagaaaaagtttggtacaaagactaaaataatgcatgtcagacatttgataagatgtcaacactcaatcgaggagtgtgacggtcatcatcattgctagattttattacttttatggatgggcatgctagctaaaattgcaaaacctctaatattttctaactgcctctgctgtttttctcctcggcccttagcactctctcctacaccatgtgataatttatattgattgctgtctatactgttccactcaatggaagcttcgtgaagtaggaacttttagtctattttatgcactgctgtatctctaagatggctggcacgtaaagagggtctcaataaatatgccttgaattaatgaaaacagtggtttctgaatcatggcctccaaagagcatttgccttttcccctctcacccttctgaaggtgcccaggctgccctggcaggatgcctctttctctgtggggtggcattctctgctctctctctaatactctttctttttcttccctcctctcccccaactgcaggatgcctttgtggaactgtacggccccagcatgcggcctctgtttgatttctcctggctgtctctgaagactctgctcagtttggccctggtgggagcttgcatcaccctgggtgcctatctgggccacaagtgaagtcaacatgcctgccccaaacaaatatgcaaaaggttcactaaagcagtagaaataatatgcattgtcagtgatgtaccatgaaacaaagctgcaggctgtttaagaaaaaataacacacatataaacatcacacacacagacagacacacacacacacaacaattaacagtcttcaggcaaaacgtcgaatcagctatttactgccaaagggaaatatcatttattttttacattattaagaaaaaaagatttatttatttaagacagtcccatcaaaactcctgtctttggaaatccgaccactaattgccaagcaccgcttcgtgtggctccacctggatgttctgtgcctgtaaacatagattcgctttccatgttgttggccggatcaccatctgaagagcagacggatggaaaaaggacctgatcattggggaagctggctttctggctgctggaggctggggagaaggtgttcattcacttgcatttctttgccctgggggctgtgatattaacagagggagggttcctgtggggggaagtccatgcctccctggcctgaagaagagactctttgcatatgactcacatgatgcatacctggtgggaggaaaagagttgggaacttcagatggacctagtacccactgagatttccacgccgaaggacagcgatgggaaaaatgcccttaaatcataggaaagtatttttttaagctaccaattgtgccgagaaaagcattttagcaatttatacaatatcatccagtaccttaagccctgattgtgtatattcatatattttggatacgcaccccccaactcccaatactggctctgtctgagtaagaaacagaatcctctggaacttgaggaagtgaacatttcggtgacttccgcatcaggaaggctagagttacccagagcatcaggccgccacaagtgcctgcttttaggagaccgaagtccgcagaacctgcctgtgtcccagcttggaggcctggtcctggaactgagccggggccctcactggcctcctccagggatgatcaacagggcagtgtggtctccgaatgtctggaagctgatggagctcagaattccactgtcaagaaagagcagtagaggggtgtggctgggcctgtcaccctggggccctccaggtaggcccgttttcacgtggagcatgggagccacgacccttcttaagacatgtatcactgtagagggaaggaacagaggccctgggcccttcctatcagaaggacatggtgaaggctgggaacgtgaggagaggcaatggccacggcccattttggctgtagcacatggcacgttggctgtgtggccttggcccacctgtgagtttaaagcaaggctttaaatgactttggagagggtcacaaatcctaaaagaagcattgaagtgaggtgtcatggattaattgacccctgtctatggaattacatgtaaaacattatcttgtcactgtagtttggttttatttgaaaacctgacaaaaaaaaagttccaggtgtggaatatgggggttatctgtacatcctggggcattaaaaaaaaaatcaatggtggggaactataaagaagtaacaaaagaagtgacatcttcagcaaataaactaggaaatttttttttcttccagtttagaatcagccttgaaacattgatggaataactctgtggcattattgcattatataccatttatctgtattaactttggaatgtactctgttcaatgtttaatgctgtggttgatatttcgaaagctgctttaaaaaaatacatgcatctcagcgtttttttgtttttaattgtatttagttatggcctatacactatttgtgagcaaaggtgatcgttttctgtttgagatttttatctcttgattcttcaaaagcattctgagaaggtgagataagccctgagtctcagctacctaagaaaaacctggatgtcactggccactgaggagctttgtttcaaccaagtcatgtgcatttccacgtcaacagaattgtttattgtgacagttatatctgttgtccctttgaccttgtttcttgaaggtttcctcgtccctgggcaattccgcatttaattcatggtattcaggattacatgcatgtttggttaaacccatgagattcattcagttaaaaatccagatggcaaatgaccagcagattcaaatctatggtggtttgacctttagagagttgctttacgtggcctgtttcaacacagacccacccagagccctcctgccctccttccgcgggggctttctcatggctgtccttcagggtcttcctgaaatgcagtggtgcttacgctccaccaagaaagcaggaaacctgtggtatgaagccagacctccccggcgggcctcagggaacagaatgatcagacctttgaatgattctaatttttaagcaaaatattattttatgaaaggtttacattgtcaaagtgatgaatatggaatatccaatcctgtgctgctatcctgccaaaatcattttaatggagtcagtttgcagtatgctccacgtggtaagatcctccaagctgctttagaagtaacaatgaagaacgtggacgtttttaatataaagcctgttttgtcttttgttgttgttcaaacgggattcacagagtatttgaaaaatgtatatatattaagaggtcacgggggctaattgctggctggctgccttttgctgtggggttttgttacctggttttaataacagtaaatgtgcccagcctcttggccccagaactgtacagtattgtggctgcacttgctctaagagtagttgatgttgcattttccttattgttaaaaacatgttagaagcaatgaatgtatataaaagcctcaactagtcatttttttctcctcttcttttttttcattatatctaattattttgcagttgggcaacagagaaccatccctattttgtattgaagagggattcacatctgcatcttaactgctctttatgaatgaaaaaacagtcctctgtatgtactcctctttacactggccagggtcagagttaaatagagtatatgcactttccaaattggggacaagggctctaaaaaaagccccaaaaggagaagaacatctgagaacctcctcggccctcccagtccctcgctgcacaaatactccgcaagagaggccagaatgacagctgacagggtctatggccatcgggtcgtctccgaagatttggcaggggcagaaaactctggcaggcttaagatttggaataaagtcacagaattaaggaagcacctcaatttagttcaaacaagacgccaacattctctccacagctcacttacctctctgtgttcagatgtggccttccatttatatgtgatctttgttttattagtaaatgcttatcatctaaagatgtagctctggcccagtgggaaaaattaggaagtgattataaatcgagaggagttataataatcaagattaaatgtaaataatcagggcaatcccaacacatgtctagctttcacctccaggatctattgagtgaacagaattgcaaatagtctctatttgtaattgaacttatcctaaaacaaatagtttataaatgtgaacttaaactctaattaattccaactgtacttttaaggcagtggctgtttttagactttcttatcacttatagttagtaatgtacacctactctatcagagaaaaacaggaaaggctcgaaatacaagccattctaaggaaattagggagtcagttgaaattctattctgatcttattctgtggtgtcttttgcagcccagacaaatgtggttacacactttttaagaaatacaattctacattgtcaagcttatgaaggttccaatcagatctttattgttattcaatttggatctttcagggattttttttttaaattattatgggacaaaggacatttgttggaggggtgggagggaggaagaatttttaaatgtaaaacattcccaagtttggatcagggagttggaagttttcagaataaccagaactaagggtatgaaggacctgtattggggtcgatgtgatgcctctgcgaagaaccttgtgtgacaaatgagaaacattttgaagtttgtggtacgacctttagattccagagacatcagcatggctcaaagtgcagctccgtttggcagtgcaatggtataaatttcaagctggatatgtctaatgggtatttaaacaataaatgtgcagttttaactaacaggatatttaatgacaaccttctggttggtagggacatctgtttctaaatgtttattatgtacaatacagaaaaaaattttataaaattaagcaatgtgaaactgaattggagagtgataatacaagtcctttagtcttacccagtgaatcattctgttccatgtctttggacaaccatgaccttggacaatcatgaaatatgcatctcactggatgcaaagaaaatcagatggagcatgaatggtactgtaccggttcatctggactgccccagaaaaataacttcaagcaaacatcctatcaacaacaaggttgttctgcataccaagctgagcacagaagatgggaacactggtggaggatggaaaggctcgctcaatcaagaaaattctgagactattaataaataagactgtagtgtagatactgagtaaatccatgcacctaaaccttttggaaaatctgccgtgggccctccagatagctcatttcattaagtttttccctccaaggtagaatttgcaagagtgacagtggattgcatttcttttggggaagctttcttttggtggttttgtttattataccttcttaagttttcaaccaaggtttgcttttgttttgagttactggggttatttttgttttaaataaaaataagtgtacaataagtgtttttgtattgaaagcttttgttatcaagattttcatacttttaccttccatggctctttttaagattgatacttttaagaggtggctgatattctgcaacactgtacacataaaaaatacggtaaggatactttacatggttaaggtaaagtaagtctccagttggccaccattagctataatggcactttgtttgtgttgttggaaaaagtcacattgccattaaactttccttgtctgtctagttaatattgtgaagaaaaataaagtacagtgtgagatactg

SEQ ID NO: 44 - DNA, 11479 bp, Homo sapiens
  misc_feature 1..11479: note = PLK1
  source 1..11479: mol_type = other DNA
ggaggctctgctcggatcgaggtctgcagcgcagcttcgggagcatgagtgctgcagtgactgcagggaagctggcacgggcaccggccgaccctgggaaagccggggtccccggagttgcagctcccggagctccggcggcggctccaccggcgaaagagatcccggaggtcctagtggacccacgcagccggcggcgctatgtgcggggccgctttttgggcaagggcggctttgccaagtgcttcgagatctcggacgcggacaccaaggaggtgttcgcgggcaagattgtgcctaagtctctgctgctcaagccgcaccagagggagaagatgtccatggaaatatccattcaccgcagcctcgcccaccagcacgtcgtaggattccacggctttttcgaggacaacgacttcgtgttcgtggtgttggagctctgccgccggagggtgagtgtcgctgctggggaactggaactgcctgcggggcagttggagcgcccagacctggagctgctggaaagagtacccagcaagggagagcctgggacttggagctgctagagaagggtgctgggagcctcccgcttacgtatggaaagtgtctttggtaagggcttcttggctctgggagctgctagaggagggggttccagtgaagtggagtctgagtcatgttgctgatagggaagtcagcttctggacgcgaggtgctggggggaggggtgctggtaatggacgctagggccctggagtacccagggaggagtcccaggttagtgatgccgcgccctgggagcttctggggtggagctgggtcagtgggggggtagttggagccagacttcgggccttccgggggagatacgagtcaggaaagggatctggtgctggggactcggagcttccggagtggggctgagagaggacccccaggtaaggggggaagctagtaggagaaggggtgctgcgaatggttgtggacagtgttaaggcagggtccagatgccgctgtgctggagaaggaatggggtgggggcatagggaaggagagaaacccaccaagacccctctttcatcccttgggagtccagagtccagtcctgtgcttcctttgcctggtaaccctctcccttccccaccggcctcaatccacctccccatccctcctgccctctccttcccacccacagtctctcctggagctgcacaagaggaggaaagccctgactgagcctgaggcccgatactacctacggcaaattgtgcttggctgccagtacctgcaccgaaaccgagttattcatcgagacctcaagctgggcaaccttttcctgaatgaagatctggaggtgaaaataggtgagttgctgagcctgcaggggtgcttgacatcactacaagaggctggaatttggaggaggctgggagaaaggaaggagacaacccacaagtcagtatcttgcctacagatgcattatttttttgtgccccaatgcaatattttttttttacaaagaatttgaatttgtttttattttttaaattggaaggtttgattgaacaaaaagtttgattcagaactccttttaaacaggtgaaagcttcagtaatacgaggacagcattttcttagggcagccctttgctgggctggaaaacagctgtccccttcagacttctttgccacagtctctactcctccctattcttcacagacttgccaagtcttggaggttaacttgcttgatccttgaaggcattggagttttactatccctgtcagttcctgtttcaaagcatagcccctttctaaaaggaggggtgagaagtgtcactggaggcacctccctggtgtcagcatgggaggaagattcctgggcaagccttgctacatacaaggagcagaggcttgtgggatcagatggccctggttctggatggtcaaaccttaactagccttctgcattgacagatgtcagaggctggcatctaagtaccaactcttcctccctctgtcccaggggattttggactggcaaccaaagtcgaatatgacggggagaggaagaagaccctgtgtgggactcctaattacatagctcccgaggtgctgagcaagaaagggcacagtttcgaggtggatgtgtggtccattgggtgtatcatgtaagttgggagttgtctctggaccaacctggtctcagcaggggcaactttgggacatcctacctggctgaccttttctgtggacctttcggcctgctttacagaaagcctactccaagggacaagtcatccccaaacaaagcctaattgtcatatctttccctgtcactggtgtatcctgtcggatttctgcagcctaggtcatgggtacagcggaggaggaggagggagagtctccacaaccttactgtagtcctttgctagagttgtccacagggcagcatcaccatcatctgggaacttgtatacacaatctcaggacccagactacttactggatcagaatctggatttttaacaaggtcccttggtgattcccttgcacaataaggtcttaaacaccgatgagcattagcatggtgggggaaattaggccaggagttacagatggaaagatgatgtgccagtggtctgtctggattaagaccatcagcagcggttggtggcaggcagaggcttgggccttttcaggtgttatctttcttgttttgggcctaggtactggagagttagaaatgagttgtagcaatggctttcatacgtctttgcagtggggttttttcaaatgaaaacttgaagacttaagtacagaactgctaaaggtggagctgcttctgtaagcgcaggtagccctttgacctgttttgcatgacaggcagcatctgaggcccttgcacagagtcctagatgaccacaggctatagctaaaaaatcactggcccttaagaatcctggtctcaccatgtgtattctgctgagggcttattctagccaatgtcatggcttctggggctgctcagtggacttagggattgtcttcaggggccccagagttagagtgagtgtccagaggatgcctgacctttgttctgaccctgagatgatttctctcatgtctgggttgtggctgggagactggtgccaaatcctaccttgtgcttacaggtataccttgttagtgggcaaaccaccttttgagacttcttgcctaaaagagacctacctccggatcaagaagaatgaatacagtattcccaaggtgactaatgatgctttaagtttacatttattttgttttccccagaagctgtttatggagcccagcaatatcctaggaccagaaataggtctatcccacctctaaggtagccacagagcttgagagggcctgtgtctgaaattgcatacagaacttgacatgtatgtgcacataagcattttttctagggggagagagttggcagattctcaagagattgggtaacccaaaagttgtgtaaaaagcaaaaaacaaaggaggtaggaaggagtaggaggcaaaagtgcttaatctttagaaatggtttatcttaattcaaatggattctgccacttagcgagatcacattgggcaaatggcctgcatcttttttttttttttttttatttgaggtggagttttgctcttgttgcccagtgcagtggcatgatcttgactcactgcaacctccacctcccaggttcaagcgattctcctgcctcagcctcccaagtagctgggattacaggcacccaccacctcgcctggctttttttttttttttttgtatttttagtagagacggggtttcaccatgttggccaggctggtctcgaactcctgacctcaggtgatccacccgccttggcctcccaaagtgctgggattacaggcgtgagccaccatacccagcctggcctgcatcttctgaaccatagtttccatatataaagtggagttcctgccttggagcacctcacagagtgccttgcatgtggtgagtgctctcagaattatgaatcactgtgaatcccagggcttcctaatggcatagttgtgtgcattttctttttttttttttttttttttttgagatggagtctcgctctgtcgcccaggctggaatgcagtggtacaatctcggctcactgcaagctctgcctcccaggttcatggcattctcccgcctcagcctcctgagtagctggaactacaggcaccagccaccatgcccggcttcttttttctgtatttgtggtagagacagggtttgaccgtgttagccaggatggtctcgatctcctgaccttgtgatccacctgcttcggactccctaagtgctgagattacaggcgtgagccaccgcgcccggccatggtgtgcattttcacaaccaccaacagaaatacatttaaaggaatagctggttcctgcagaagcctagcacacagccagtttgaagtgtagtgtccttgtgtgaagccaggaggcctgtcaccataaggacagacatagtaaatccatcacaaagtgtcagttcactgtcagagacagcatggaatcaagccagctagacaaggccttcaccctctctgtgcctcactttcctcctctgtgaaaaagggatgataatagatccccaccccttagatgagttggtgagggctaagtgagctaaacacaggagtgcttagaatgctttcctggcacatagtgagtgctaggaaagtgagttggtgttcggccacagtccattgacccttctgtcaatggtgctcagtaaagctgacagtggagaacttggcattgaaccaagttgtgaaccactgacctgtggtgtatttgagactgggggctgcatgtgggctggggacctgcagctcctttgaggccgtactgtactccaggtccccttcacattctgcttatggctgtccctctctctgccccagcacatcaaccccgtggccgcctccctcatccagaagatgcttcagacagatcccactgcccgcccaaccattaacgagctgcttaatgacgagttctttacttctggctatatccctgcccgtctccccatcacctgcctgaccattccaccaaggttttcgattgctcccagcagcctggaccccagcaaccggaagcccctcacagtcctcaataaaggtacaacaagggtctgggtaagagagcagaccccccagagaaagcccaggttgtaggggtgtgtgcagcttagtccctggccctgagagctcaggtgtggagtaggacaggcctctgtccttcaatccgtggttccaatgcccatctgcttctcggccctgccaggaaagactgaccttaccatggctggataaacgtaccatgcccaagaagaagaaaatggattgaatgccaagcctgaaaaattctttcaaatcactttaattaatttaattttttggagacagggtctctcctctattttccaggttggagtgcagaggcacaatcacagctcactgcagctttcaactctagggctcaattgatcctcccatctcagcctcccaagtagctgggactgtcaggcatgcaccaccatgcctggctgacttttctaatttttgtagagacagtgttttgccatgttgcccaggctggtcttggaactcctgggctcaagcgatcctttcacctccaccaaagtgttgggatgacaggcatgagctgctacatctggcctttaaaaaaatttctaacactttttcatgattcattgaaaaacataaaaatttccttttttttgtggcgtgatcccggctcactgcaagctctgcctcccgggttcacgccgttctcctgcctcagcctcctgagtagctgggactacaggcgcccaccaccatgcccggctgtttttttgtatcttttagtagagacggggtttcactgtgttagccaggatggtctcaatctcctgacctcgtgatccgcctgcctcggcctcccaaagggctgagattacaggcgtgaaccaccaggcccggccttttttttttttttttttttttttttttttttttttttttttgagacagggtctggctctgtctcctaggctggaggggagtggtatgatctcgatttcactaaggatacatagttttaaaaagtcacttgaaatactttttttctctgtggatatatcaccaatttgatgtacaacttcagttcatttttcagttttcaatttttaggtattggtttttcttaaacttcattttggaataattttaggcttatacagaaaagttgcaacaacaacaaaaaactccccagagttcctacataccttgcagcaattattacagtggaattttttttgagacaggtctcaggacttgctgtcacccaggctggaatgcagtggctcactcatagcttactgcagccccaacatcctgggctcaaacagtccccctgccttaccctccagagtagctaggactacaggcatgtgccaccatacccagctaattaaaaaatttttttctttgggaggccgaggtgggtggattgcccgagctcaggagttcgagatcagcctgggcaacatggcgaaacgctgtctctactaaaaatacaaaagactagccgggcgtggtggtgtgcacctgtaatctcagctactcgggacactgaggcacaagaatcacttgaacctggaaggcggaggttgcagtgagccgaggtctcaccactgcactccagcctgggcaacagagcgagactctgtctcaaaaaaaaaaaaaaattttttttttgtaaagacaagatctcactatgtcgaccaggcttatctcaaactcctgccctcaagtgatcctcctcggcctcccaaagtgttaggatttacaggtgtgagccactgtgccctgcctagaatgatgttctaatggtaatttttcttttcctcactttttttgcatttaataattggaattcttctgtaaggaagagctgttccttctctccgattgatttatttatttggttatgtctgaaatagactcatggatatttttattctttgggctatattttaaaggattacttatttctctgcttttatttatttttttaaatttgagacagggtcttgctctgtctcccgggctggagtgcagtggcacagtcgtacctcacagtagctttgatctcctgggctcaagtgatcctccagcctcagcctcccaagtagttgagactttaggcatgtgccaccgcgtctgaccaatttttaaatttttggtagagatgaggtcttgcccacactggtctcaaactcctgagctcaagtgatcctcctgcctcagactcctactttttttctttcagttttaattttttatatagcattttaaaaacttaaggaaattttcagttacccgaaggtggagagaactgtatgatgagtcccatgtttcatctatttttactagttatcaacatttggacagactgttttatttattccagcctcctgccttttttgttaccggtgttttaaaaaattattatttactatttattattatttatttgagacattcttgctttgttgcccaggctggagtgctgtggcaagatcatggctcactgcagcctccacctcctgcgttcaagtgactctcccacctcagcctcccaagtagctaggactacaggtgtgccaccatgtccagctagtttctgtatttttagtaaagacagggttttgccatgttgctcaggctggtctcaaactcctgagctcaaacaatctacctgcctcggtctctcatagtgttgggattacaagtgtgagccactgggcctggccttgctggagtgtttaaagcaaatccctaatatcttattatttcatacccaagtccctatcatgacatcgttttttaattgaaaacttaaacattttatattatacaaggagaattagcacatggtggtgggggaataaataaataaggaaaaagacaataagaataatctgtgtttctactgcccagatataatcagcgttaaaatttcatgttatcttttcaagcttttttggttataaataagcatataaagcaaattttggggtggaaaaaaatttcttgtgtttttatttaaatgcctactgaatccattctgtggatgaactgaactactcagcccttccatctgcctggatgctgaagatgctttccattctttgctcaaagctgggcagctctgagctgctggtgccttcaagctgtttgcctgagtggcaggtcatcctgcagggccacaccgttgggtcagaggccacggcttctgaagatctgttgcctcacagtgagcactatgtgcctgtcacctgagcatggcagctgctgctctagtaaccaggcactgattcagtttccccaaagcagtggtagctaagagaatttttctttcggaagagtttcagctgtggcaggggagtcccgtgcccttcccaacgcccctgtttttgtcaccttcctaggcttggagaaccccctgcctgagcgtccccgggaaaaagaagaaccagtggttcgagagacaggtgaggtggtcgactgccacctcagtgacatgctgcagcagctgcacagtgtcaatgcctccaagccctcggagcgtgggctggtcaggcaaggtgggtactgcggggccctgggcggggcaggattgcttggggcatctggaaaaggcaggaggaggcttggccaacaaagcactggtgacttgttcaggccctgtctgcataggaccattggtttccccatttcctgatatccaaggccctgcttccgtggctcctgccgccttttctgatccgtcttttttactctagcacctcgatgtgccaccttcatacgctgtttcttttgctcagtaagttcctattgtatcttcaagacccttgaaataacagacccagatgtactgcagcctcagggctttctccctggtcctggcacgaaagcacttcttccagacaccacatggctcacactgtggcctccttcaagtgtctgctccagtgtcagctctgtgagcatctccctggcccctctgctggtgcttctcatcctcttgcccactgcatagttctccataacacttctcacccaacatagtccaacatgtccttctttgtttattggatttaaattaaggggtttgttgcatgcactgaacgtaacattttgatgtgtttgcaactggcttctgtcttcacagtttcttaattactccaaactggaaaactagatgcctctgactcttaccatgatagaagtcactgatattttgcccatacttaaattgattagtctttgcccctacaaccacagtgtaagctccgtggaggctggggttttgtctgttgctcactgaacctgcaacagtgcctggcacggtaggccttcagtaaatgggtcagtggaatgaaggagtgagtggaacttggtgcgctgtgctgagactttctctgcagagatatctgtgctgctgcttgtctgagcctgctggcagcagaggccctgctttgctcttctctggggccctaggcctctcaactgagcccaggtggggtgcccagcaggcttccctgttccctggtgtgggccacatgtgtggagcagaggggaagaggctggtcctgaccaactaactgtctgtctgtttctgtctcagaggaggctgaggatcctgcctgcatccccatcttctgggtcagcaagtgggtggactattcggacaagtacggccttggtaggtttcttccagaacaggtgggtgactcaggcacagccaggtgaccttttcagttgttacagactctggcctttttgagctcccaggtactgttctcagtgccctcctctctccatcccaggcctcccagttccagctcccagtgctccctgactccccagctttttttttttccagagacagggtcctgctctgtagcccaggctggagtgcagtggcacaatcatggctcactgcagcctcaaactcccaggcccctaagtagctgtgactacaggcgtgcaccattatgctcagctaatttttaaaatattttgtagagatggggtctcattacgttgcccaggctggtctcaaactcctgggctcaaacaatcctcctccctcagcctcccaaagtgctggaatcacaggcatgtgccaccacgcccggtcccactccccactttctattccccctttctgagacctctctccaccgatccctagggtatcagctctgtgataacagcgtgggggtgctcttcaatgactcaacacgcctcatcctctacaatgatggtgacagcctgcagtacatagagcgtgacggcactgagtcctacctcaccgtgagttcccatcccaactccttgatgaagaaggtgagtgccgtccggcccatggggggtggtgttgcagaagtgggacctgtgctggaggatcagactctaattctggaaccccttacctacttttcatccagatcaccctccttaaatatttccgcaattacatgagcgagcacttgctgaaggcaggtgccaacatcacgccgcgcgaaggtgatgagctcgcccggctgccctacctacggacctggttccgcacccgcagcgccatcatcctgcacctcagcaacggcagcgtgcagatcaacttcttccaggtgagctggaggtcaccaggcgcaggagagagctggggtaggctccgcatgcctggcagtggcccatgtgggttgaatgtggagtgagcggctcaggtacctataacctgttgtgtcttccctctactccctaacatacactggcctctgggatcgccaacccctgctgctcttctcttgcaggatcacaccaagctcatcttgtgcccactgatggcagccgtgacctacatcgacgagaagcgggacttccgcacataccgcctgagtctcctggaggagtacggctgctgcaaggagctggccagccggctccgctacgcccgcactatggtggacaagctgctgagctcacgctcggccagcaaccgtctcaaggcctcctaatagctgccctcccctccggactggtgccctcctcactcccacctgcatctggggcccatactggttggctcccgcggtgccatgtctgcagtgtgccccccagccccggtggctgggcagagctgcatcatccttgcaggtgggggttgctgtataagttatttttgtacatgttcgggtgtgggttctacagccttgtccccctccccctcaaccccaccatatgaattgtacagaatatttctattgaattcggaactgtcctttccttggctttatgcacattaaacagatgtgaatattc

SEQ ID NO: 45 - protein, 189 aa, Homo sapiens
  REGION 1..189: note = GTPase HRas
MTEYKLVVVGAGGVGKSALTIQLIQNHFVDEYDPTIEDSYRKQVVIDGETCLLDILDTAGQEEYSAMRDQYMRTGEGFLCVFAINNTKSFEDIHQYREQIKRVKDSDDVPMVLVGNKCDLAARTVESRQAQDLARSYGIPYIETSAKTRQGVEDAFYTLVREIRQHKLRKLNPPDESGPGCMSCKCVLS

SEQ ID NO: 46 - protein, 189 aa, Homo sapiens
  REGION 1..189: note = GTPase NRas
MTEYKLVVVGAGGVGKSALTIQLIQNHFVDEYDPTIEDSYRKQVVIDGETCLLDILDTAGQEEYSAMRDQYMRTGEGFLCVFAINNSKSFADINLYREQIKRVKDSDDVPMVLVGNKCDLPTRTVDTKQAHELAKSYGIPFIETSAKTRQGVEDAFYTLVREIRQYRMKKLNSSDDGTQGCMGLPCVVM

SEQ ID NO: 47 - protein, 189 aa, Homo sapiens [sequence omitted]

SEQ ID NO: 48 - protein, 239 aa, Homo sapiens
  REGION 1..239: note = Apoptosis regulator Bcl-2 (isoform alpha)
MAHAGRTGYDNREIVMKYIHYKLSQRGYEWDAGDVGAAPPGAAPAPGIFSSQPGHTPHPAASRDPVARTSPLQTPAAPGAAAGPALSPVPPVVHLTLRQAGDDFSRRYRRDFAEMSSQLHLTPFTARGRFATVVEELFRDGVNWGRIVAFFEFGGVMCVESVNREMSPLVDNIALWMTEYLNRHLHTWIQDNGGWDAFVELYGPSMRPLFDFSWLSLKTLLSLALVGACITLGAYLGHK

SEQ ID NO: 49 - protein, 603 aa, Homo sapiens
  REGION 1..603: note = Serine/threonine-protein kinase PLK1
MSAAVTAGKLARAPADPGKAGVPGVAAPGAPAAAPPAKEIPEVLVDPRSRRRYVRGRFLGKGGFAKCFEISDADTKEVFAGKIVPKSLLLKPHQREKMSMEISIHRSLAHQHVVGFHGFFEDNDFVFVVLELCRRRSLLELHKRRKALTEPEARYYLRQIVLGCQYLHRNRVIHRDLKLGNLFLNEDLEVKIGDFGLATKVEYDGERKKTLCGTPNYIAPEVLSKKGHSFEVDVWSIGCIMYTLLVGKPPFETSCLKETYLRIKKNEYSIPKHINPVAASLIQKMLQTDPTARPTINELLNDEFFTSGYIPARLPITCLTIPPRFSIAPSSLDPSNRKPLTVLNKGLENPLPERPREKEEPVVRETGEVVDCHLSDMLQQLHSVNASKPSERGLVRQEEAEDPACIPIFWVSKWVDYSDKYGLGYQLCDNSVGVLFNDSTRLILYNDGDSLQYIERDGTESYLTVSSHPNSLMKKITLLKYFRNYMSEHLLKAGANITPREGDELARLPYLRTWFRTRSAIILHLSNGSVQINFFQDHTKLILCPLMAAVTYIDEKRDFRTYRLSLLEEYGCCKELASRLRYARTMVDKLLSSRSASNRLKAS

SEQ ID NO: 50 - protein, 22 aa, synthetic construct
  REGION 1..22: note = Flagellin 22 (flg22)
QRLSTGSRINSAKDDAAGLQIA

SEQ ID NO: 51 - DNA, 22 bp, synthetic construct
  misc_feature 1..22: note = WRKY29 forward primer
  source 1..22: mol_type = other DNA
tatccaacggatcaagagctga

SEQ ID NO: 52 - DNA, 22 bp, synthetic construct
  misc_feature 1..22: note = WRKY29 reverse primer
  source 1..22: mol_type = other DNA
ttttcttgccaaacaccctttt

SEQ ID NO: 53 - DNA, 22 bp, synthetic construct
  misc_feature 1..22: note = FRK1 forward primer
  source 1..22: mol_type = other DNA
tatcttgagctgggaagagagg

SEQ ID NO: 54 - DNA, 22 bp, synthetic construct
  misc_feature 1..22: note = FRK1 reverse primer
  source 1..22: mol_type = other DNA
agtcgaatagtactcggggtca

SEQ ID NO: 55 - DNA, 18 bp, synthetic construct
  misc_feature 1..18: note = WRKY53 forward primer
  source 1..18: mol_type = other DNA
cagacggggatgctacgg

SEQ ID NO: 56 - DNA, 19 bp, synthetic construct
  misc_feature 1..19: note = WRKY53 reverse primer
  source 1..19: mol_type = other DNA
ggcgaggctaatggtggtg

SEQ ID NO: 57 - DNA, 250 bp, synthetic construct
  misc_feature 1..250: note = Pto DC300 hrpL IR (AB016421)
  source 1..250: mol_type = other DNA
ctgatgactgacatcaccgtgcccttccagctcggaatgcacttcgtcttcccagctttcctgatacggctgacgatacattttgcggaagtgattgcggatcaggttcagcgcgatgccacacagccaggtctgcggtttgctggcatgttgaaacttgtgctcgttacgcagggcttcaagaaacacgcactggagaatgtcatccacatcatcagggttcatcacccgcttttggataaacgccctg

SEQ ID NO: 58 - DNA, 752 bp, synthetic construct
  misc_feature 1..752: note = Cyp51
  source 1..752: mol_type = other DNA
cagcaagtttgacgagtccctggccgctctctaccacgacctcgatatgggcttcacccccatcaacttcatgcttcactgggcccctctcccctggaaccgtaagcgcgaccacgcccagcgcactgttgccaagatctacatggacactatcaaggagcgccgcgccaagggcaacaacgaatccgagcatgacatgatgaagcaccttatgaactctcggtccattgacaatccccgtctttggtagcgatgtcgtatacgattgtcccaactcgaagctcatggaacaaaagaagtttgtcaagtttggccttacgcaaaaagcactcgagtcacacgtccagttaatcgagcgagaggttcttgactacgtcgaaactgatccatccttttctggcagaactagcaccatcgatgtccccaaggcaatggctgagataacaatctttactgcctcacgttctttgcagggtgaggaagttcggagaaaactcactgccgagtttgctgcattggaagcaccgtacaatatggcatcgacccgtacgcttttttcttcgactgcagagataaatacggcgactgctttacctttattctccttggcaaatcaacgactgtctttcttggtcccaagggcaatgactttatcctcaacggcaaacacgccgatctcaacgccgaggacgtttatgggaaacttaccacgcccgtgtttggtgaggaggttgtttatgactgctccaatg

SEQ ID NO: 59 - DNA, 1806 bp, synthetic construct
  misc_feature 1..1806: note = GUS (AB538275)
  source 1..1806: mol_type = other DNA
atgttacgtcctgtagaaaccccaacccgtgaaatcaaaaaactcgacggcctgtgggcattcagtctggatcgcgaaaactgtggaattgatcagcgttggtgggaaagcgcgttacaagaaagccgggcaattgctgtgccaggcagttttaacgatcagttcgccgatgcagatattcgtaattatgcgggcaacgtctggtatcagcgcgaagtctttataccgaaaggttgggcaggccagcgtatcgtgctgcgtttcgatgcggtcactcattacggcaaagtgtgggtcaataatcaggaagtgatggagcatcagggcggctatacgccatttgaagccgatgtcacgccgtatgttattgccgggaaaagtgtacgtatcaccgtttgtgtgaacaacgaactgaactggcagactatcccgccgggaatggtgattaccgacgaaaacggcaagaaaaagcagtcttacttccatgatttctttaactatgccggaatccatcgcagcgtaatgctctacaccacgccgaacacctgggtggacgatatcaccgtggtgacgcatgtcgcgcaagactgtaaccacgcgtctgttgactggcaggtggtggccaatggtgatgtcagcgttgaactgcgtgatgcggatcaacaggtggttgcaactggacaaggcactagcgggactttgcaagtggtgaatccgcacctctggcaaccgggtgaaggttatctctatgaactgtgcgtcacagccaaaagccagacagagtgtgatatctacccgcttcgcgtcggcatccggtcagtggcagtgaagggccaacagttcctgattaaccacaaaccgttctactttactggctttggtcgtcatgaagatgcggacttacgtggcaaaggattcgataacgtgctgatggtgcacgaccacgcattaatggactggattggggccaactcctaccgtacctcgcattacccttacgctgaagagatgctcgactgggcagatgaacatggcatcgtggtgattgatgaaactgctgctgtcggctttaacctctctttaggcattggtttcgaagcgggcaacaagccgaaagaactgtacagcgaagaggcagtcaacggggaaactcagcaagcgcacttacaggcgattaaagagctgatagcgcgtgacaaaaaccacccaagcgtggtgatgtggagtattgccaacgaaccggatacccgtccgcaagtgcacgggaatatttcgccactggcggaagcaacgcgtaaactcgacccgacgcgtccgatcacctgcgtcaatgtaatgttctgcgacgctcacaccgataccatcagcgatctctttgatgtgctgtgcctgaaccgttattacggatggtatgtccaaagcggcgatttggaaacggcagagaaggtactggaaaaagaacttctggcctggcaggagaaactgcatcagccgattatcatcaccgaatacggcgtggatacgttagccgggctgcactcaatgtacaccgacatgtggagtgaagagtatcagtgtgcatggctggatatgtatcaccgcgtctttgatcgcgtcagcgccgtcgtcggtgaacaggtatggaatttcgccgattttgcgacctcgcaaggcatattgcgcgttggcggtaacaagaaagggatcttcactcgcgaccgcaaaccgaagtcggcggcttttctgctgcaaaaacgctggactggcatgaacttcggtgaaaaaccgcagcagggaggcaaacaa

SEQ ID NO: 60 - protein, 542 aa, synthetic construct
  REGION 1..542: note = GUS (AAA72769)
MLRPVETPTREIKKLDGLWAFSLDRENCGIDQRWWESALQESRAIAVPGSFNDQFADADIRNYAGNVWYQREVFIPKGWAGQRIVLRFDAVTHYGKVWVNNQEVMEHQGGYTPFEADVTPYVIAGKSVRITVCVNNELNWQTIPPGMVITDENGKKKQSYFHDFFNYAGIHRSVMLYTTPNTWVDDITVVTHVAQDCNHASVDWQVVANGDVSVELRDADQQVVATGQGTSGTLQVVNPHLWQPGEGYLYELCVTAKSQTECDIYPLRVGIRSVAVKGQQFLINHKPFYFTGFGRHEDADLRGKGFDNVLMVHDHALMDWIGANSYRTSHYPYAEEMLDWADEHGIVVIDETAAVGFNLSLGIGFEAGNKPKELYSEEAVNGETQQAHLQAIKELIARDKNHPSVVMWSIANEPDTRPQVHGNISPLAEATRKLDPTRPITCVNVMFCDAHTDTISDLFDVLCLNRYYGWYVQSGDLETAEKVLEKELLAWQEKLHQPIIITEYGVDTLAGLHSMYTDMWSEEYQCAWLDMYHRVFDRVSKQ

SEQ ID NO: 61 - protein, 220 aa, synthetic construct
  REGION 1..220: note = AvrRpm1 (Q7BE94)
MGCVSSTSRSTGYYSGYENHEEPRVASSPTNRHDRGYETDSEHSNVNLIPNARRVYKESVLWHGTSMQSKIDLRRQGFDVNRKTDGATEGSRTSNSAPTDTLIRNARRHNYLTAYDVTAKNYARRADPESPALVRTIGVKSNFNIELDPESKDENGEISQFSCRTTDSIPKKYIVGSKSSQPGADAKVFKKELSNAGFEVSTSRAGELLRAVQSDSEDDF

SEQ ID NO: 62 - RNA, 24 nt, synthetic construct
  misc_feature 1..24: note = luxA siRNA (sense)
  source 1..24: mol_type = other RNA
caaacagaggtaatgaaatggttg

SEQ ID NO: 63 - RNA, 24 nt, synthetic construct
  misc_feature 1..24: note = luxA siRNA (antisense)
  source 1..24: mol_type = other RNA
caaccatttcattacctctgtttg

SEQ ID NO: 64 - RNA, 24 nt, synthetic construct
  misc_feature 1..24: note = luxB siRNA (sense)
  source 1..24: mol_type = other RNA
atgttaagttgaataagttctgca

SEQ ID NO: 65 - RNA, 24 nt, synthetic construct
  misc_feature 1..24: note = luxB siRNA (antisense)
  source 1..24: mol_type = other RNA
tgctcttgaataagttgaattgat

SEQ ID NO: 66 - DNA, 18 bp, synthetic construct
  misc_feature 1..18: note = Hygro 1 Fwd primer
  source 1..18: mol_type = other DNA
agcgtctccgacctgatg

SEQ ID NO: 67 - DNA, 17 bp, synthetic construct
  misc_feature 1..17: note = Hygro 2 Rev primer
  source 1..17: mol_type = other DNA
cgacggacgactgacgg

SEQ ID NO: 68 - DNA, 22 bp, synthetic construct
  misc_feature 1..22: note = GFP Fwd Primer
  source 1..22: mol_type = other DNA
gtccaggagcgcaccatcttct

SEQ ID NO: 69 - DNA, 24 bp, synthetic construct
  misc_feature 1..24: note = GFP Rev Primer
  source 1..24: mol_type = other DNA
gatgcccttcagctcgatgcggtt

SEQ ID NO: 70 - DNA, 4107 bp, unidentified
  misc_feature 1..4107: note = Cas9 coding sequence
  source 1..4107: mol_type = other DNA
atggataaaaaatacagcattggtctggacattggcacgaatagcgttggttgggcagtgattaccgatgaatacaaagtcccgtcgaaaaaattcaaagtgctgggtaacaccgatcgccatagcattaagaaaaacctgatcggtgcgctgctgtttgattctggcgaaaccgcggaagcaacgcgtctgaaacgtaccgcacgtcgccgttacacgcgccgtaaaaatcgtatttgctatctgcaggaaatctttagcaacgaaatggcgaaagtcgatgactcatttttccaccgcctggaagaatcgtttctggtggaagaagataaaaaacatgaacgtcacccgattttcggcaatatcgttgatgaagtcgcgtaccatgaaaaatatccgacgatttaccacctgcgtaaaaaactggtggattctaccgacaaagccgatctgcgcctgatttatctggcactggctcatatgatcaaatttcgtggtcacttcctgattgaaggcgacctgaacccggataatagtgacgtcgataaactgtttattcagctggtgcaaacctataatcagctgttcgaagaaaacccgatcaatgcaagtggtgttgatgcgaaagccattctgtccgctcgcctgagtaaatcccgccgtctggaaaacctgattgcacagctgccgggtgaaaagaaaaacggtctgtttggcaatctgatcgctctgtcactgggcctgacgccgaactttaaatcgaatttcgacctggcagaagatgctaaactgcagctgagcaaagatacctacgatgacgatctggacaacctgctggcgcaaattggcgaccagtatgccgacctgtttctggcggccaaaaatctgtcagatgccattctgctgtcggacatcctgcgcgtgaacaccgaaatcacgaaagcgccgctgtcagcctcgatgattaaacgctacgatgaacatcaccaggacctgaccctgctgaaagcactggttcgtcagcaactgccggaaaaatacaaagaaattttctttgaccaaagtaaaaatggttatgcaggctacatcgatggcggtgcttcccaggaagaattctacaaattcatcaaaccgatcctggaaaaaatggatggtacggaagaactgctggtgaaactgaatcgtgaagatctgctgcgtaaacaacgcacctttgacaacggtagcattccgcatcagatccacctgggcgaactgcatgcgattctgcgccgtcaggaagatttttatccgttcctgaaagacaaccgtgaaaaaatcgaaaaaatcctgacgtttcgcatcccgtattacgttggtccgctggcacgtggtaatagccgcttcgcatggatgacccgcaaatctgaagaaaccattacgccgtggaactttgaagaagtggttgataaaggcgcaagcgctcagtcttttatcgaacgtatgaccaatttcgataaaaacctgccgaatgaaaaagtgctgccgaaacattctctgctgtatgaatactttaccgtttacaacgaactgacgaaagtgaaatatgttaccgagggtatgcgcaaaccggcgtttctgagtggcgaacagaaaaaagccattgtggatctgctgttcaaaaccaatcgtaaagttacggtcaaacagctgaaagaagattacttcaagaaaattgaatgtttcgacagcgtggaaatttctggtgttgaagatcgtttcaacgcctctctgggcacctatcatgacctgctgaaaatcatcaaagacaaagattttctggataacgaagaaaacgaagacattctggaagatatcgtgctgaccctgacgctgttcgaagatcgtgaaatgattgaagaacgcctgaaaacgtacgcacacctgtttgacgataaagttatgaaacagctgaaacgccgtcgctataccggttggggccgtctgagccgcaaactgattaatggtatccgcgataaacaatcaggcaaaacgattctggatttcctgaaatcggacggctttgccaaccgtaatttcatgcagctgatccatgacgattccctgacctttaaagaagacattcagaaagcacaagtgtcaggtcaaggcgattcgctgcatgaacacattgcgaacctggccggttcaccggctatcaaaaaaggcatcctgcagaccgtgaaagtcgtggatgaactggtgaaagttatgggtcgtcacaaaccggaaaacattgttatcgaaatggcgcgcgaaaatcagaccacgcaaaaaggccagaaaaactcgcgtgaacgcatgaaacgcattgaagaaggtatcaaagaactgggcagccagattctgaaagaacatccggtcgaaaacacccagctgcaaaatgaaaaactgtacctgtattacctgcaaaatggtcgtgacatgtatgtggatcaggaactggacatcaaccgcctgtctgactatgatgtcgaccacattgtgccgcagagctttctgaaagacgattctatcgataacaaagttctgacccgtagtgataaaaaccgcggcaaaagcgacaatgtcccgtctgaagaagttgtgaagaaaatgaaaaactactggcgtcaactgctgaatgcgaaactgattacgcagcgtaaattcgataacctgaccaaagcggaacgcggcggtctgtccgaactggataaagccggttttatcaaacgtcaactggttgaaacccgccagattacgaaacatgtcgcccagatcctggattcacgcatgaacacgaaatacgacgaaaacgataaactgatccgtgaagtcaaagtgatcaccctgaaaagtaaactggtttccgatttccgtaaagactttcagttctacaaagtccgcgaaattaacaattaccatcacgcacacgatgcttatctgaatgcagtggttggtaccgctctgatcaaaaaatatccgaaactggaaagcgaatttgtgtatggcgattacaaagtctatgacgtgcgcaaaatgattgcgaaatccgaacaggaaatcggcaaagcgaccgccaaatactttttctattcaaacatcatgaactttttcaaaaccgaaattacgctggcaaatggtgaaattcgtaaacgcccgctgatcgaaaccaacggtgaaacgggcgaaattgtgtgggataaaggccgtgacttcgcgaccgttcgcaaagtcctgtcgatgccgcaagtgaatatcgtgaagaaaaccgaagtgcagacgggcggttttagtaaagaatccatcctgccgaaacgtaacagcgataaactgattgcgcgcaaaaaagattgggacccgaaaaaatacggcggttttgatagtccgacggttgcatattccgtcctggtcgtggctaaagtcgaaaaaggtaaaagtaaaaaactgaaatccgtgaaagaactgctgggcattaccatcatggaacgtagctcttttgagaaaaacccgattgacttcctggaagccaaaggttacaaagaagtgaaaaaagatctgatcatcaaactgccgaaatatagcctgttcgaactggaaaacggccgtaaacgcatgctggcatctgctggtgaactgcagaaaggcaatgaactggcactgccgagtaaatatgttaactttctgtacctggctagccattatgaaaaactgaaaggttctccggaagataacgaacagaaacaactgttcgtcgaacaacataaacactacctggatgaaatcatcgaacagatctcagaattctcgaaacgcgtgattctggcggatgccaatctggacaaagttctgagcgcgtataacaaacatcgtgataaaccgattcgcgaacaggccgaaaatattatccacctgtttaccctgacgaacctgggcgcaccggcagcttttaaatacttcgataccacgatcgaccgtaaacgctatacctcaacgaaagaagttctggatgctaccctgattcatcaatcgatcaccggtctgtatgaaacgcgtattgatctgagtcagctgggcggtgactaa

SEQ ID NO: 71 - protein, 1368 aa, unidentified [sequence omitted]

SEQ ID NO: 72 - DNA, 57 bp, synthetic construct
  misc_feature 1..57: note = GT1 sense siRNA against plant GUS (betaglucuronidase)
  source 1..57: mol_type = other DNA
tacactgtggaattgatcagcgttcagatgacgctgatcaattccacagtttttttt

SEQ ID NO: 73 - DNA, 61 bp, synthetic construct
  misc_feature 1..61: note = GT1 antisense siRNA against plant GUS (betaglucuronidase)
  source 1..61: mol_type = other DNA
ctagaaaaaaaactgtggaattgatcagcgtcatctgaacgctgatcaattccacagtgta

SEQ ID NO: 74 - DNA, 57 bp, synthetic construct
  misc_feature 1..57: note = GT2 sense siRNA against plant GUS (betaglucuronidase)
  source 1..57: mol_type = other DNA
tacttgatcagcgttggtgggattcagatgatcccaccaacgctgatcaattttttt

SEQ ID NO: 75 - DNA, 61 bp, synthetic construct
  misc_feature 1..61: note = GT2 antisense siRNA against plant GUS (betaglucuronidase)
  source 1..61: mol_type = other DNA
ctagaaaaaaattgatcagcgttggtgggatcatctgaatcccaccaacgctgatcaagta

SEQ ID NO: 76 - DNA, 57 bp, synthetic construct
  misc_feature 1..57: note = GT3 sense siRNA against plant GUS (betaglucuronidase)
  source 1..57: mol_type = other DNA
tacctgtggaattgatcagcgtttcagatgaacgctgatcaattccacagttttttt

SEQ ID NO: 77 - DNA, 61 bp, synthetic construct
  misc_feature 1..61: note = GT3 antisense siRNA against plant GUS (betaglucuronidase)
  source 1..61: mol_type = other DNA
ctagaaaaaaactgtggaattgatcagcgttcatctgaaacgctgatcaattccacaggta

SEQ ID NO: 78 - DNA, 1812 bp, Arabidopsis thaliana
  misc_feature 1..1812: note = Beta-glucuronidase (GUS) encoding nucleic acid
  source 1..1812: mol_type = other DNA
atggtccgtcctgtagaaaccccaacccgtgaaatcaaaaaactcgacggcctgtgggcattcagtctggatcgcgaaaactgtggaattgatcagcgttggtgggaaagcgcgttacaagaaagccgggcaattgctgtgccaggcagttttaacgatcagttcgccgatgcagatattcgtaattatgcgggcaacgtctggtatcagcgcgaagtctttataccgaaaggttgggcaggccagcgtatcgtgctgcgtttcgatgcggtcactcattacggcaaagtgtgggtcaataatcaggaagtgatggagcatcagggcggctatacgccatttgaagccgatgtcacgccgtatgttattgccgggaaaagtgtacgtatcaccgtttgtgtgaacaacgaactgaactggcagactatcccgccgggaatggtgattaccgacgaaaacggcaagaaaaagcagtcttacttccatgatttctttaactatgccggaatccatcgcagcgtaatgctctacaccacgccgaacacctgggtggacgatatcaccgtggtgacgcatgtcgcgcaagactgtaaccacgcgtctgttgactggcaggtggtggccaatggtgatgtcagcgttgaactgcgtgatgcggatcaacaggtggttgcaactggacaaggcactagcgggactttgcaagtggtgaatccgcacctctggcaaccgggtgaaggttatctctatgaactgtgcgtcacagccaaaagccagacagagtgtgatatctacccgcttcgcgtcggcatccggtcagtggcagtgaagggcgaacagttcctgattaaccacaaaccgttctactttactggctttggtcgtcatgaagatgcggacttacgtggcaaaggattcgataacgtgctgatggtgcacgaccacgcattaatggactggattggggccaactcctaccgtacctcgcattacccttacgctgaagagatgctcgactgggcagatgaacatggcatcgtggtgattgatgaaactgctgctgtcggctttaacctctctttaggcattggtttcgaagcgggcaacaagccgaaagaactgtacagcgaagaggcagtcaacggggaaactcagcaagcgcacttacaggcgattaaagagctgatagcgcgtgacaaaaaccacccaagcgtggtgatgtggagtattgccaacgaaccggatacccgtccgcaaggtgcacgggaatatttcgcgccactggcggaagcaacgcgtaaactcgacccgacgcgtccgatcacctgcgtcaatgtaatgttctgcgacgctcacaccgataccatcagcgatctctttgatgtgctgtgcctgaaccgttattacggatggtatgtccaaagcggcgatttggaaacggcagagaaggtactggaaaaagaacttctggcctggcaggagaaactgcatcagccgattatcatcaccgaatacggcgtggatacgttagccgggctgcactcaatgtacaccgacatgtggagtgaagagtatcagtgtgcatggctggatatgtatcaccgcgtctttgatcgcgtcagcgccgtcgtcggtgaacaggtatggaatttcgccgattttgcgacctcgcaaggcatattgcgcgttggcggtaacaagaaagggatcttcactcgcgaccgcaaaccgaagtcggcggcttttctgctgcaaaaacgctggactggcatgaacttcggtgaaaaaccgcagcagggaggcaaacaatga

SEQ ID NO: 79 - protein, 603 aa, Arabidopsis thaliana
  REGION 1..603: note = Q93VY4 ARATH Beta-glucuronidase
MVRPVETPTREIKKLDGLWAFSLDRENCGIDQRWWESALQESRAIAVPGSFNDQFADADIRNYAGNVWYQREVFIPKGWAGQRIVLRFDAVTHYGKVWVNNQEVMEHQGGYTPFEADVTPYVIAGKSVRITVCVNNELNWQTIPPGMVITDENGKKKQSYFHDFFNYAGIHRSVMLYTTPNTWVDDITVVTHVAQDCNHASVDWQVVANGDVSVELRDADQQVVATGQGTSGTLQVVNPHLWQPGEGYLYELCVTAKSQTECDIYPLRVGIRSVAVKGEQFLINHKPFYFTGFGRHEDADLRGKGFDNVLMVHDHALMDWIGANSYRTSHYPYAEEMLDWADEHGIVVIDETAAVGFNLSLGIGFEAGNKPKELYSEEAVNGETQQAHLQAIKELIARDKNHPSVVMWSIANEPDTRPQGAREYFAPLAEATRKLDPTRPITCVNVMFCDAHTDTISDLFDVLCLNRYYGWYVQSGDLETAEKVLEKELLAWQEKLHQPIIITEYGVDTLAGLHSMYTDMWSEEYQCAWLDMYHRVFDRVSAVVGEQVWNFADFATSQGILRVGGNKKGIFTRDRKPKSAAFLLQKRWTGMNFGEKPQQGGKQ

SEQ ID NO: 80 - DNA, 20 bp, synthetic construct
  misc_feature 1..20: note = eGFP (1-1) Fwd3 Primer
  source 1..20: mol_type = other DNA
cacatgaagcagcacgactt

SEQ ID NO: 81 - DNA, 18 bp, synthetic construct
  misc_feature 1..18: note = eGFP (1-1) Rev3 Primer
  source 1..18: mol_type = other DNA
gcgcgggtcttgtagttg

SEQ ID NO: 82 - DNA, 20 bp, synthetic construct
  misc_feature 1..20: note = mCherry(1-1) Fwd1 Primer
  source 1..20: mol_type = other DNA
gaccacctacaaggccaaga

SEQ ID NO: 83 - DNA, 18 bp, synthetic construct
  misc_feature 1..18: note = mCherry(1-1) Rev1 Primer
  source 1..18: mol_type = other DNA
ccgctcgtactgctccac

SEQ ID NO: 84 - DNA, 20 bp, synthetic construct
  misc_feature 1..20: note = Gus Fwd Primer
  source 1..20: mol_type = other DNA
cgctcacaccgataccatca

SEQ ID NO: 85 - DNA, 20 bp, synthetic construct
  misc_feature 1..20: note = Gus Rev Primer
  source 1..20: mol_type = other DNA
cggctgatgcagtttctcct

SEQ ID NO: 86 - DNA, 851 bp, synthetic construct
  misc_feature 1..851: note = AMT-1 viral promoter sequence
  source 1..851: mol_type = other DNA
atcagtaatgtgttaattgcgaacgcttgtaatggtgaacgaatccaattcggaaatgcagtcgactacaattattctttgacacctttgttgacgacgcatgcaaagttgaatattgacaatctcgtataaattattcgtttatgctgtttcaaatcatattgaagttcactggttttagagtgtcgaaaagtatcatatcaacgattatagtatttaatgacaatactcgcgactgtcatagtttatttttcaacaatggagtctcgtcatcatatcaatttgacgaatgttgttcgtatacaaaatataacagatgattttatttgcgaatacgaagattcttcttatggagaagaaccagttaataacaaatcggaagaagttcatacagcgttcaaattatatgacatagatgacgaaacattgtacaattattacaacggagtggtcgtacatactacaaatggattgccaatagtattcgcaatggatacacaccgaggttgttgcgagaaattttgtatcacggtacaattaccagggggccttacgcgatatgattttattggcgccacgattacgaaggtaagatttggtaaagaaaaacgcaaatgcgatattaatttttcggaattaattatagaaacttcggtaggaaatatcgttttactggcagaaaacattcataatggatattactctcatgatgtattcgcttgttttgaaggtaaagttgaaacttttcgtttgtaaatacaaaaaatgtatatgagtatttgttgtcggaatgtcatatcaacaatgttgtgtatatatgtgtaaactaaaatacactatatattatttaa

SEQ ID NO: 87 - DNA, 609 bp, synthetic construct
  misc_feature 1..609: note = AMT-2 viral promoter sequence
  source 1..609: mol_type = other DNA
gaattctacttatataccatatcattttccataacaaattgaaagtcgaatgatttaccacgtcctccgatttgttctacgctcttcaattttgtaatatcaatgacatttgaaatactttctaacagtctctgttgaacacttgtattttcgttaatatcacgattatttagtgtatcaactataatttttctcgctgcttattgttaatatcgttgtctccgcgaatacctgttacgaaaatatcatcaggattatcccgttccttttcagcaagtttttccgcctttactcgttccttttcagcaagtttttccgcctttactcgttccttttcagcaagtttttccgcctttactcgttccttttcgattttgctaacctttttcattttcataagattgattatgtttataatattcagcatatttatgttctgttcacatattaatatatataaataaaatgacacaaaaatgacacaaaaatgacacaaaaatgacacaaaaatgacatagaatttacacttgtacactagacacgtgtacacaatatcatatcaacatacgaaacaacttaaattaaaaaaaatgattgattttataaatt

SEQ ID NO: 88 - DNA, 270 bp, synthetic construct
  misc_feature 1..270: note = CMT-1 viral promoter sequence
  source 1..270: mol_type = other DNA
tgtgatgaacttgagttttacaaaaatatttctggtggaactatatattatagtccatcagataagaatgtcggatttgttatcattcccaagggtacagaagtccatatgaaatatgttaatcttgatcaagaatgattgtcattgtatatttaaaccatttatacaataagcgttgatataagtttgtatatacgtcatttcgttatatcaacaaatgttatcatattatacgtaaaactggcttaaaaaaaaacgagtgtaactata

SEQ ID NO: 89 - DNA, 121 bp, synthetic construct
  misc_feature 1..121: note = CaMV 35S viral promoter sequence
  source 1..121: mol_type = other DNA
caatcccactatccttcgcaagacccttcctctatataaggaagttcatttcatttggagaggacacgctcgaggaattcggtaccccgggttcgaaatcgataagcttggatcctctaga

SEQ ID NO: 90 - DNA, 2859 bp, synthetic construct
  misc_feature 1..2859: note = GPDH3 plant promoter sequence
  source 1..2859: mol_type = other DNA
tgtcgcaattcacacatccacatgtcgcaacctgaccatgtcaaataacttgcaagctgctatatgtagcctgtgcgtgccggtgcataccgaccaagtgagagtgttgcgtttgcgtgtatgcgtttttgtctcaccgcagtcatgaactgcccaaccctttccaagaatgtatgttctaatgccaaggcgttgttatgcgccaacttctatgcttgcttgaggccgggtgcgttcctggaacaagctgtttgagagcttcaacaattgcgcactggcagcaggtcttagaccagcgtacagtagaatcacgagtgggtgacgggctgatgccggatgatgctcaaggcttgcacagtggggtaggtgcacatttttgaaacactaatgacaatgattgcacacaaaacgcttgctgcatgttgtcaaatggaaattcaatcatggagcaacggggcttgggtgaggtgggactggtggaagggtgtgcgtgttctttgatcaaatcgtttcctctttctgcagcggctgggggtgtgccggggtttggggtttccgagcatgggcgttaggcatacctgggttggtgccgtgcgtaccgtacgtatggaggcagccccgcataccgtgcgtaatgctttccagctcacgtctaactgatgtgttatctcaaactgggtgcggactatctacgacccgcctgggtcagtagtcctggcgccggcccgcccggcgcaacacggtgtagagagcgtgtgtgcatggtgacaggatgggcaagcaaggtggcgtggaggtcgttcgtgacaggcgctttattttgacagggcaacggcacacggggaacacgcgcggttatgggtaaccccccaactttgaggccccagcaaagtgtgcttggtgattcgtagcacgctaaaattttggctaccccccgtgccgtttgcaatcttccggccgtgcaatccagattgccccagtcatgtagcggtttttgcaacgacggggtgcagagggaaggggaggggagggggcaagtcttaagcatccagtgcaaactgccgggcatacattttttaaccacttatatttttggcgcgttggtttggtgtttgacattgcggcttgaaaggcagcactgcggtgtaggcgggtacgtgtgcacccaactgccggccggtggagccacctgaaacaccttgcgcgccacgcgacaggctgcattgtgacgttttcttggtgcagtggatgggaacaagcagtatttggtaaagcctattgatagcaatggcgcgcaggctgagcgaggagctgtccggtgtctgggtagcgctccgcattggggcgagcaaggcgtgtgtgccaagcggcagcagcggcatgacacgtagtgtggcagcgacgcatgtgctgagtcgtcctggctggctctgctgtggtggcttgaccactgctgggcacctgctgggttcggctacgtgcctgttcagaccgattccgctgtcaggacctgccagccactgtaacatgctgagtagctttctgccttccgcctgagacgtgaactcatgactagttgttagcagcctgcacggcagccacacgccaccagagctttcatcaggctgagaggcagcgcaacctgcacgcgctaggtcgcgaccccggctatgtccgggcgatgaggtagttcggcctcagacttgcggagaggctcagccccttttccctcgggaactcgatgcgaccgcaaaggctcttgcccgtcccccttcggggcaaggggcaaaccaacctgtcgtgtcatcaagagagtccagctatcgaggatgcaggaaagtcctagcaccaggtgagacccaacccaaagcgccccagaacccaaacccacccgatccacccacaaagcccccacccgagcacacaaacccagcccttacggacccgaacccctaacctaccccagccctgtcgcccacaccaagcccggagttatggctatgagtggactctagccgtcgttcagccaggcgtagagtgttgctgccagcgctgctgatggcacgccgctgaggtcttgcgggcgtccatactactattgcgtgctcgctggctcgtgagatccgtcagcggattccgcatgtagccaatcttcgttggtccacgtcaaattcggaaagaaatcaagacccagaaccctcccgtgtgtgtaaggggggaggggggcggtgtcggtggggacgtgggaaaccaaggaaagctgccgatcggttctacctcgtaagcctcacgggttaaactccctatcgtcccaccggccccgtcccgattccgcgtttaggccgtccatgcttggtgtcggtcgctggtcacagctttgcaaggccggccgacatgaagcgccgattagccgcgggtccgtcgtttatgggttacgtcaaggattcttggagctatgcgaactgaggtggacccggcgattgtcagacaggctgactgaattggttgaaggcccgtcgcagtcgcgcgaaagtttcgggaagttcgccatcttactggcgaatgacaacgcttccggcgccaggtattagtcgtgtcccttgttgtcgtcacgattggaccccacccgcttcccgcggatttagcccgatcccgcttgcatggggtggtctgactgcatggatcgcggactccataaatagccgatgtgccagacttggcggtcctgaatcacagcttgagaatacataaactcaatcgccaagcaacaaagctacagccctatatcggcagttgcaacatcccagcgcgggggttcgactgcgtaattacgagcgtcgttgagccgagtttgcaacc

SEQ ID NO: 91 - DNA, 1179 bp, synthetic construct
  misc_feature 1..1179: note = 20R plant promoter sequence
  source 1..1179: mol_type = other DNA
cacatatcaaatccaattcagtgttcggtattttcaaagctgaaattcatcgaaaaaagattacagagattttgttttgtgtgttagagtatagatcggaatcgacagacaaaagagggaaacttacaactgaatttcgccggagaatgagacggcgaagagttcaccggaagaagaaacggagattgcgagagccgaagaggctgggcctaattcaaaaatgggccaaaagtactcaaaaacatgggtcctgtatttggactatccatggataaaattaaaacaatagccacttttcaaaccacttaattgaaatatagtcatttgtataattaatcacgtttgtataattcaccacatttgtgtaatttgcaactaacaattcttcgtttaatttgtatttgtatacgatggtttgtatttgtatatgacgatgatttcctttggtttttcaattttgtcaccatgtacattcaatttttttgtgtgcaactttttaaagtttgtataaatgtgtagtttttggattttgtataacataatttatataatgtaatttgtataacacattttgaataattgtttaaagttcatatatttatgtttgtatcaatttatatttcgagttttatcatatttgtataattccaaactttatattactcaattatacaaaaacacgcgaattatacaaacatacctgcgaattatacaaattattgccctctctcgctcgcctctctcctccctctcccaatgctcgcctctctcctccctctcccaatctcacttgtcatttgtacaaatacatatgtgtaatatacaattatctaaccgatatacattgataattcacctctctcccactctctgccctctctctctcgctcgcctctctcctccctctcccaatctctcgctattctcctccctataacatgtagctacaaatcgtaattaacaaactatagctatgaaacttaattagactatttttgagtgactacatgtgaaagttcctctttctttaaagttgaagtgtgagtagtgtgaaggcccaaatgaggcaaagaccccatccataaagatggcccaagctaaccaccagcagtccggcccacatttgcagacaaataaaaccaaaatggaaggtggagaatttccaaaaccgctcattcc

SEQ ID NO: 92 - DNA, 325 bp, synthetic construct
  misc_feature 1..325: note = Ubi plant promoter sequence
  source 1..325: mol_type = other DNA
gggcccaatataacaacgacgtcgtaacagataaagcgaagcttgaaggtgcatgtgactccgtcaagattacgaaaccgccaactaccacgcaaattgcaattctcaatttcctagaaggactctccgaaaatgcatccaataccaaatattacccgtgtcataggcaccaagtgacaccatacatgaacacgcgtcacaatatgactggagaagggttccacaccttatgctataaaacgccccacacccctcctccttccttcgcagttcaattccaatatattccattctctctgtgtatttccctacctctcccttcaag

SEQ ID NO: 93 - DNA, 251 bp, synthetic construct
  misc_feature 1..251: note = psaDb plant promoter sequence
  source 1..251: mol_type = other DNA
tgtggtcacacctcaaactaaatcaaccagtttgcatttttttccttctcaatgttaatttgctgacttggctagggtgcgaatcaaatcacacgttctaattgggcaaaatccgtatatcaccttatcctatatcctttttctccaccacccatcatctcttctatgcaacaaaaatagcttcttccttttcatttttcacttctctcaatccaacttttctatggccatggcatcccaagcttcccttt

SEQ ID NO: 94 - DNA, 251 bp, synthetic construct
  misc_feature 1..251: note = alpha-2 tubulin plant promoter sequence
  source 1..251: mol_type = other DNA
gcgacgttgcaagcttaaaggtcaagagcgattatacgctgttccaaagagggtaatcaacatcttccactatgctaggcgcgagtttctccagtcgtacgatgattcaaaagtttgcgtgccatgcttagatttgcgtttgctgtacaatgtcgtgaccttgagcgggtacaaaatgttgccgcgcagtcagtgctggtatcaaagctttacacgaaactttcatttactgatatataagctcgttggga

SEQ ID NO: 95 - DNA, 251 bp, synthetic construct
  misc_feature 1..251: note = beta-2 tubulin plant promoter sequence
  source 1..251: mol_type = other DNA
gtgaccattaccagcaacactcctttcaacgcaaattccagcctgctggacgttatgcataatccacgtacgtcccaccccgccatgatggcgccatgcggaatttttttggaaaaacggggccctacatgtacgggctctttacacttcgaacagtcggctgcaggactacttaatgcaagctgcggggcagagaaattataacaagcgaccactacatctactgtatataagaccttgcgcctctgcta

SEQ ID NO: 96 - DNA, 251 bp, synthetic construct
  misc_feature 1..251: note = NIT1 plant promoter sequence
  source 1..251: mol_type = other DNA
ggagctcgatggccccgggttgtttggggcgtccgcctctcgcgctattctgagctggagaccgaggcgcatgaaaatgcattcgcttccataggacgctgcattgtggcttgaaggttcaagggaagggttcaaacgaccccgccgtacgaacttttgtcggggggcgctcccggccccgggctcttgtgcgcgcattagggcttcgggtcgcaagcaagacgatacaggaaccgaccaatcgatagtct

SEQ ID NO: 97 - DNA, 251 bp, synthetic construct
  misc_feature 1..251: note = Fe-hydrogenase plant promoter sequence
  source 1..251: mol_type = other DNA
cttcgagcgctgcccggaacaatgcgtactagtataggagccatgaggcaagtgaacagaagcgggctgactggtcaaggcgcacgatagggctgacgagcgtgctgacggggtgtaccgccgagtgtccgctgcattcccgccggattgggaaatcgcgatggtcgcgcataggcaagctcgcaaatgctggtcagcttatcttacatgaacacacaaacactctcgcaggcactagcctcaaaccctcg

SEQ ID NO: 98 - DNA, 251 bp, synthetic construct
  misc_feature 1..251: note = rbcS1 plant promoter sequence
  source 1..251: mol_type = other DNA
ctgcttgcaggctcttcccagcacttgcattcttccttgcatcctccactcagctcacaagcccacccctgaaagcactcacgcagcacaacccgctgcattttaaacaacgctgtccaacagggcctcctcactctcacactacctcaacaaacaaggggaagttggttactaatatcctggcacgcacagtcatccacactctctcaattaattcttttaacccccagtccacacacccttcacaaaac

SEQ ID NO: 99 - DNA, 251 bp, synthetic construct
  misc_feature 1..251: note = rbcS2 plant promoter sequence
  source 1..251: mol_type = other DNA
ggttttggagaaatggtggatgcactccttgctcacccttggctggactttcaggcgtctctgcacccaaacatcttcacttgaatgaactggatgaggaatttcctaaaggagcaacaacattgtcacccgaagagcatgggttcacacttatcactcaaaatcacgccttttaagtttgtgagatttctcgcattaccactttactttatacgtccattcctgcacacacccactcacacaccacccca

SEQ ID NO: 100 - DNA, 251 bp, synthetic construct
  misc_feature 1..251: note = NR plant promoter sequence
  source 1..251: mol_type = other DNA
cttgcacagcgcctgattgtcgttgttgttggtttgtaaatacgagggagatcttgcatcaggcctcaaagcagcaacgcagctgaaattttttgtgcctttcagctgagctcgagacactctcgcgagggtcaccttcctttggcgcaatggcaccccaccagcacctcaaatagaggacaggcacggcagccctccaattccacccagccctgccaactcctccctcatactcctcgcaccggccgcca

SEQ ID NO: 101 - DNA, 251 bp, synthetic construct
  misc_feature 1..251: note = hsp70b plant promoter sequence
  source 1..251: mol_type = other DNA
ttgcgcgaggaatcctgcgctgcacacgcttccaagggaggccattggtcaggcgataacgtgaggttgctgaccagtgaaatgtgcgttaccttagaagtcagcgcgttccacacgacggcctcggcatggaacaacctagaacccccatgcaggctacctgcagccactagaagagcatgcttccgcatatgaccaggacgctctcgctgctgcaggcacttgtcaacgtgcgcaagtgaacaatactc

SEQ ID NO: 102 - DNA, 251 bp, synthetic construct
  misc_feature 1..251: note = rca plant promoter sequence
  source 1..251: mol_type = other DNA
tattagcagacacgtggaggcgtggttgtaacacagtgacaaagtaaaaaacattggacaaggcgtcacagcatgaggggccacgtgaggcgatcatcgcgtttgacacgggccattttttgagcacctcacgttcgtggtcatacctctttccggcgtttggaaagccgcacttgtctgcattgcattcgcgttgagtgccacttttcaagccttgatctttcaccatgcagatgcagatgaagaacacg

SEQ ID NO: 103 - DNA, 251 bp, synthetic construct
  misc_feature 1..251: note = AOX1 plant promoter sequence
  source 1..251: mol_type = other DNA
cttgaagttgatatccatagctagaagtatgacgctgtagattacaacgttgcggcggcggtcgacaccagtgcatcacgaacacgtctgacgatggtgacggaaagtgccttccggtgcatgcaacatgtgagcgcctgctcgaatcgtctacactggaacttcgaaacgtatattactgttcctttactataacggcgtaaatcctctctcgcactcacttacccaagaactcaacgttacgtcaccgt

SEQ ID NO: 104 - DNA, 741 bp, synthetic construct
  misc_feature 1..741: note = ABSAP(i) synthetic promoter sequence
  source 1..741: mol_type = other DNA
gctgaggcttgacatgattggtgcgtatgtttgtatgaagctacaggactgatttggcgggctatgagggcgggggaagctctggaagggccgcgatggggcgcgcggcgtccagaaggcgccatacggcccgctggcggcacccatccggtataaaagcccgcgaccccgaacggtgacctccactttcagcgacaaacgagcacttatacatacgcgactattctgccgctatacataaccactcagctagcttaagatcccatcaccggtctggcactttcttgcgctatgacacttccagcaaaaggtagggcgggctgcgagacggcttcccggcgctgcatgcaacaccgatgatacttatgcttcgaccccccgaagctccttcggggctgcatgggcgctccgatgccgctccagggcgagcgctgtttaaatagccaggcccccgactgcaaagacattatagcgagctaccaaagccatacttcaaacacctagatcactaccacttctacacaggccactcgagcttgtggtgagtcgacgagcaagcccggcggatcaggcagcgtgcttgcagatttgacttgcaacgcccgcattgtgtcgacgaaggcttttggctcctctgtcgctgtctcaagcagcatctaaccctgcgtcgccgtttccatttgcagatcgcactccgctaagggggcgcctcttcctcttcgtttcagtcacaacccgcaa

SEQ ID NO: 105 - DNA, 271 bp, synthetic construct
  misc_feature 1..271: note = 4xSBox-minimal-35SCaMV-TMV-omega synthetic promoter sequence
  source 1..271: mol_type = other DNA
gaattcaattgggtctcaggagtctagacagccaccaaagaggacccagaatactagacagccaccaaagaggacccagaatactagacagccaccaaagaggacccagaatactagacagccaccaaagaggacccagaatactagtcgcaagacccttcctctatataaggaagttcatttcatttggagaggactatttttacaacaattaccaacaacaacaaacaacaaacaacattacaattactatttacaattaccctaggcc

SEQ ID NO: 106 - DNA, 987 bp, Chlorella vulgaris
  misc_feature 1..987: note = CvNDZ1 promoter
  source 1..987: mol_type = other DNA
cgcggttggccaccagcagcttggtgatgggagcctgggtcatggcgactgggtctgcagggcaacgcgagcaaaaagggagcggttgagcaggcagtgccgccgccagctgccgggagcgcaggcaagcgttggcccgcattgccggtggcgcattctgaaatgccgggttgcgtgcgtgtgtgctcacaacacgctgacagcgaaaaccgacgcagaaccccacacaggccggggtgccccctcccgcccttgctgcgtctgccggccgcatcagtttatcattgatgtcacgatgcatgcatttgctatgaggccctgctcccaaaactagggctctgccccgtgcatcacctgcgcagtccctctcgcgatgcgcaggcgcaccacaatggtgccaatgctgcagagaagatacaaccaagaagatacaaccaagaggaggagaagcggccatcgttgggtccatcaccgactgccagctggctcctcccgccgcaatccgcaacccttgcgcggcacatctggagacagctggcagctggcctgtgctcaacacgccctttacctatcctcttcgccgccacaatcagtgtcccacatttgtgagtgcaagccgagcccaaccggatttcatttacgcatgaccgcctacacgcctgcggttgcggcgctgcgctgccgagtgcgtcactcgtttttacagcgacccacaccacggcactctgtagggagcatcaactgagcccaccgtcgtccgatcccgtcaacatcacctggggaagctgctgctgcctgaaaaggatgtgaccctggtaccaacttttctgcccctctgacggggcggtggtctctcatgcattgggttcacccatatattgcgcgggcacacactccgccccccattcttttcaactctcactcctcatcccccaggcacgttgccaccgctcagcagggccggggagctcccatcaccttggcgaa

SEQ ID NO: 107 - DNA, 999 bp, Chlorella vulgaris
  misc_feature 1..999: note = CvNDZ2 promoter
  source 1..999: mol_type = other DNA
gggctctgggtccacctgaaaagtgggtcgcctttgtgcttgttcatcaaagttctttcaagggcagatcggaaggcgtaacctctgctagccatctgcctgcaccgcctccgccaccacctctacccactggccgccatgtcttcgagacggcatcatgatggaatggaatgttacatgcatcagtgatgcaaacaagcctacacaacccattatgtgcgctgcgctgatcaagctggatccccgtccccctcgcaccccagcacaccgccaagcagtccgcgatccaccaattcctgcaccaagcctctgggcagcctgtgggcagccagacctttgtaccacagcaccgcagcgccaacctcggctgccgacagcctttgagcggcacttggccccgcccttgaggcactttcgccgctggcgttgctgctgctgctggtgctgtttctggtgctgctgccctccccgggcttggccctgccgccagttctcgacaccgctgcggcagccatggcagcagccctgctcgcaggtgccagcactaggagtgcataggcagcttgcagccccaggcagtcgattacggtatctaacgctgcaagccgtcgttgatggcaacgactcagctgcagctgctggttgcgagccatgcccagagcctcgagcttggcagcgctgcaggcaacaggcagggcgcggcacagttgctgacatcagcacagcagcgcaacagcgtcatgttgcactgcagcaactcctcaacactcgactgcacagctggccacagccgtgcacgctttgccacatgccgcacagcacaacacacataccggtctggcgccagcctgccccgctgccactggtgcagctggaacgaggcccaggcacgcaagccgtcgccggcagggagaggtgcgctcagcaggtccccatcacgctgctggtgcagctcacagagctgagtgtagcggcggtcccaccggccctcccttgggt

SEQ ID NO: 108 - DNA, 250 bp, Soymovirus
  misc_feature 1..250: note = SVFLt promoter
  source 1..250: mol_type = other DNA; note = Peanut chlorotic streak virus
gagatcttgagccaatcaaagaggagtgatgtagacctaaagcaataatggagccatgacgtaagggcttacgccattacgaaataattaaaggctgatgtgacctgtcggtctctcagaacctttactttttatatttggcgtgtatttttaaatttccacggcaatgacgatgtgacctgtgcatccgctttgcctataaataagttttagtttgtattgatcgacacgatcgagaagacacggccat

SEQ ID NO: 109 - DNA, 606 bp, Cauliflower mosaic virus
  misc_feature 1..606: note = Enhanced 35S (E35S) promoter
  source 1..606: mol_type = other DNA
tgagacttttcaacaaagggtaatatccggaaacctcctcggattccattgcccagctatctgtcactttattgtgaagatagtggaaaaggaaggtggctcctacaaatgccatcattgcgataaaggaaaggccatcgttgaagatgcctctgccgacagtggtcccaaagatggacccccacccacgaggagcatcgtggaaaaagaagacgttccaaccacgtcttcaaagcaagtggattgatgtgattgagacttttcaacaaagggtaatatccggaaacctcctcggattccattgcccagctatctgtcactttattgtgaagatagtggaaaaggaaggtggctcctacaaatgccatcattgcgataaaggaaaggccatcgttgaagatgcctctgccgacagtggtcccaaagatggacccccacccacgaggagcatcgtggaaaaagaagacgttccaaccacgtcttcaaagcaagtggattgatgtgatatctccactgacgtaagggatgacgcacaatcccactatccttcgcaagacccttcctctatataaggaagttcatttcatttggagaggacacgctgaa

SEQ ID NO: 110 - DNA, 301 bp, Figwort mosaic virus
  misc_feature 1..301: note = Sgt promoter
  source 1..301: mol_type = other DNA
tttacagtaagaactgataacaaaaattttacttatttccttagaattaatcttaaaggtgatagtaaacaaggacgattagtccgttggcaaaattggttcagcaagtatcaatttgatgtcgaacatcttgaaggtgtaaaaaacgttttagcagattgcctcacgagagattttaatgcttaaaaacgtaagcgctgacgtatgatttcaaaaaacgcagctataaaagaagccctccagcttcaaagttttcatcaacacaaattctaaaaacaaaattttttagagagggggagtg

SEQ ID NO: 111 - DNA, 516 bp, Cassava vein mosaic virus
  misc_feature 1..516: note = CsVMV promoter
  source 1..516: mol_type = other DNA
ttccagaaggtaattatccaagatgtagcatcaagaatccaatgtttacgggaaaaactatggaagtattatgtgagctcagcaagaagcagatcaatatgcggcacatatgcaacctatgttcaaaaatgaagaatgtacagatacaagatcctatactgccagaatacgaagaagaatacgtagaaattgaaaaagaagaaccaggcgaagaaaagaatcttgaagacgtaagcactgacgacaacaatgaaaagaagaagataaggtcggtgattgtgaaagagacatagaggacacatgtaaggtggaaaatgtaagggcggaaagtaaccttatcacaaaggaatcttatcccccactacttatccttttatatttttccgtgtcatttttgcccttgagttttcctatataaggaaccaagttcggcatttgtgaaaacaagaaaaaatttggtgtaagctattttctttgaagtactgaggatacaacttcagagaaatttgtaagttt

SEQ ID NO: 112 - DNA, 377 bp, Peanut chlorotic streak virus
  misc_feature 1..377: note = SV promoter
  source 1..377: mol_type = other DNA
gagtttttacttcggacagtcaaaaatgagtttaacttctcagccgaggtaaaacaagaaatatgcttacgtctacagagggatttctctgaagatcatgtttgccagctatgcgaacaatcatcgggagatcttgagccaatcaaagaggagtgatgtagacctaaagcaataatggagccatgacgtaagggcttacgccattacgaaataattaaaggctgatgtgacctgtcggtctctcagaacctttactttttatatttggcgtgtatttttaaatttccacggcaatgacgatgtgacctgtgcatccgctttgcctataaataagttttagtttgtattgatcgacacgatcgagaagacacggccat

SEQ ID NO: 113 - DNA, 353 bp, Cauliflower mosaic virus
  misc_feature 1..353: note = 35S promoter
  source 1..353: mol_type = other DNA
tgagacttttcaacaaagggtaatatccggaaacctcctcggattccattgcccagctatctgtcactttattgtgaagatagtggaaaaggaaggtggctcctacaaatgccatcattgcgataaaggaaaggccatcgttgaagatgcctctgccgacagtggtcccaaagatggacccccacccacgaggagcatcgtggaaaaagaagacgttccaaccacgtcttcaaagcaagtggattgatgtgatatctccactgacgtaagggatgacgcacaatcccactatccttcgcaagacccttcctctatataaggaagttcatttcatttggagaggacacgctgaa

SEQ ID NO: 114 - DNA, 436 bp, Cotton leaf curl Burewala virus
  misc_feature 1..436: note = CLCuBuV Rep/CLCuBuV CP promoter
  source 1..436: mol_type = other DNA
ggtaccatggtggcaatcggtgtacactctaattctctggcaatcggtgtaacggggtgcaatatataggtgtaccccaaatggcattatcgtaatttgagaaatcatttcaaaatcctcacgctccaaaaagcggccatccgtataatattaccggatggccgcgcttttttttttgtgggcccccgatttacgagattgctccctcaaagctaaataacgctcccgcacactataagtacttgcgcactaagtttcaaattcaaacatgtgggatccactattaaacgaattccctgatacggttcacgggtttcggtgtatgctttctgtgaaatatttgcaacttttgtcgcaggattattcaccggatacgcttgggtacgagttaatacgggatttaatttgtattttacgctcccgtaatcatgagctc

SEQ ID NO: 115 - DNA, 580 bp, Figwort mosaic virus
  misc_feature 1..580: note = FMV promoter
  source 1..580: mol_type = other DNA
tcatcaaaatatttagcagcattccagattgggttcaatcaacaaggtacgagccatatcactttattcaaattggtatcgccaaaaccaagaaggaactcccatcctcaaaggtttgtaaggaagaattctcagtccaaagcctcaacaaggtcagggtacagagtctccaaaccattagccaaaagctacaggagatcaatgaagaatcttcaatcaaagtaaactactgttccagcacatgcatcatggtcagtaagtttcagaaaaagacatccaccgaagacttaaagttagtgggcatctttgaaagtaatcttgtcaacatcgagcagctggcttgtggggaccagacaaaaaaggaatggtgcagaattgttaggcgcacctaccaaaagcatctttgcctttattgcaaagataaagcagattcctctagtacaagtggggaacaaaataacgtggaaaagagctgtcctgacagcccactcactaatgcgtatgacgaacgcagtgacgaccacaaaagaattccctctatataagaaggcattcattcccatttgaaggatcatcagat

SEQ ID NO: 116 - DNA, 215 bp, Cytomegalovirus
  misc_feature 1..215: note = Pptca1 promoter
  source 1..215: mol_type = other DNA
gacttcgacttaccaatgacttctatatcgctttcatatctataaattgtaatacagagtggacgatgataaatgaacttcctttaacggttttaaaaaacgtatttaagggatattatcatcaagatacccggaaaggtgacgtttttcctcgaatacgtcacgatgccgtagggagtgacgcacgagcttcatcatcgatcttgacggcaaaa

SEQ ID NO: 117 - DNA, 766 bp, Cauliflower mosaic virus
  misc_feature 1..766: note = e35S-4ocs promoter
  source 1..766: mol_type = other DNA
tgagacttttcaacaaagggtaatatccggaaacctcctcggattccattgcccagctatctgtcactttattgtgaagatagtggaaaaggaaggtggctcctacaaatgccatcattgcgataaaggaaaggccatcgttgaagatgcctctgccgacagtggtcccaaagatggacccccacccacgaggagcatcgtggaaaaagaagacgttccaaccacgtcttcaaagcaagtggattgatgtgattgagacttttcaacaaagggtaatatccggaaacctcctcggattccattgcccagctatctgtcactttattgtgaagatagtggaaaaggaaggtggctcctacaaatgccatcattgcgataaaggaaaggccatcgttgaagatgcctctgccgacagtggtcccaaagatggacccccacccacgaggagcatcgtggaaaaagaagacgttccaaccacgtcttcaaagcaagtggattgatgtgataggtccaccaaaaacgtaagcgcttacgtacatggtcgataggtccaccaaaaacgtaagcgcttacgtacatggtcgataggtccaccaaaaacgtaagcgcttacgtacatggtcgataggtccaccaaaaacgtaagcgcttacgtacatggtcgatatctccactgacgtaagggatgacgcacaatcccactatccttcgcaagacccttcctctatataaggaagttcatttcatttggagaggacacgctgaa

SEQ ID NO: 118 - DNA, 108 bp, synthetic construct
  misc_feature 1..108: note = Ageratum yellow vein virus promoter
  source 1..108: mol_type = other DNA
taacatgtatgataatgagcccagtactgctactatcaagaatgatcttcgagaccgttatcaagttttaaggaaattcacttcaacagtcacagggggtcaatatgc

SEQ ID NO: 119 - DNA, 453 bp, Tomato leaf curl virus
  misc_feature 1..453: note = TLCV promoter
  source 1..453: mol_type = other DNA
tgactttggtcaattagagacaactgatgggcttttactctgggaattggagactggatacaatttatagtgtctccaaatggcatattctgtaaataactagaagtttgtttgaaattcaaattcccctttgggctccaaaagcggccatccgtataatattaccggatggccgcgcgattttttgtgggccctaccattaactcttgtcggccaatcatatgacgcgctcaaagcttaaataattctcccgcttattataagtacttcgttgctaagtttgcgtttgaaaaatgtgggatccacttttaaatgagttccccgacaccgttcacggttttaggtgtatgttagcagttaaatatttgcagttagtagagaaaacttactctcctgatacattgggttacgatttgataagggacttaatcctggtaataagggctaggaatt

SEQ ID NO: 120 - DNA, 851 bp, Chlorella sp.; identical to SEQ ID NO: 86
  misc_feature 1..851: note = AMT-1 promoter
  source 1..851: mol_type = other DNA

SEQ ID NO: 121 - DNA, 608 bp, Chlorella sp.
  misc_feature 1..608: note = AMT-2 promoter
  source 1..608: mol_type = other DNA
gaattctacttatataccatatcattttccataacaaattgaaagtcgaatgatttaccacgtcctccgatttgttctacgctcttcaattttgtaatatcaatgacatttgaaatactttctaacagtctctgttgaacacttgtattttcgttaatatcacgattatttagtgtatcaactataatttttctcgctgcttattgttatatcgttgtctccgcgaatacctgttacgaaaatatcatcaggattatcccgttccttttcagcaagtttttccgcctttactcgttccttttcagcaagtttttccgcctttactcgttccttttcagcaagtttttccgcctttactcgttccttttcgattttgctaacctttttcattttcataagattgattatgtttataatattcagcatatttatgttctgttcacatattaatatatataaataaaatgacacaaaaatgacacaaaaatgacacaaaaatgacacaaaaatgacatagaatttacacttgtacactagacacgtgtacacaatatcatatcaacatacgaaacaacttaaattaaaaaaaatgattgattttataaatt

SEQ ID NO: 122 - DNA, 270 bp, Chlorella sp.; identical to SEQ ID NO: 88
  misc_feature 1..270: note = CMT-1 promoter
  source 1..270: mol_type = other DNA

SEQ ID NO: 123 - DNA, 1701 bp, Oryza sativa
  misc_feature 1..1701: note = UBQ1 (RUBQ1) promoter
  source 1..1701: mol_type = other DNA
gtcgacctgatgattattttgttgatcatgattttcttttggctatttgattttttgaaagatatttttttccctgggaagacacctatgggacgaagatattatgttatatatatatatatatatatatatatatatatatatatatatatatatatatatatatcacatcagtctctgcacaaagtgcatcctgggctgcttcaattataaagccccattcaccacatttgcgagatagtcgaaaagcaccatcaatattgagcttcaggtatttttggttgtgttgtggttggattgagtccgatatataccaaatcaatataattcactacggaatataccatagccatcacaactttattaattttggtagcttaagatggtatatataataaccaattaacaactgattctaattttactacggcccagtatctaccaatacaaaacaacgagtatgttttcttccgtcgtaatcgtacacagtacaaaaaaacctggccagcctttcttgggctggggctctctttcgaaaggtcacaaaacgtacacggcagtaacgcccttcgctgcgtgttaacggccaccaaccccgccgtgacgaaacggcatcagctttccacctcctcgatatctccgcggcgccgtctggacccgccccctttccgttcctttctttccttctcgcgtttgcgtggtggggacggactccccaaaccgcctctccctctctttatttgtctatattctcactgggccccacccaccgcacccctgggcccactcacgagtccccccctcccgacctataaataccccaccccctcctcgcctcttcctccatcaatcgaatccccaaaatcgcagagaaaaaaaaatctcccctcgaagcgaagcgtcgaatcgccttctcaaggtatgcgattttctgatcctctccgttcctcgcgtttgatttgatttcccggcctgttcgtgattgtgagatgttgtggttagtctccgttttgcgatctgtggtagatttgaacagggttagatggggttcgcgtggtatgctggatctgtgattatgagcgatgctgaacgtggtccaagtattgattggttcggatctagaagtagaagtagaactgtgctagggttgtgatttgttccgatctgttcaatcagtaggatttagtctctgtttttctcgttgagccaagtagcagcgtcaggtatattttgcttaggttgtttttgattcagtccctctagttgcatagattctactctgttcatgtttaatctaagggctgcgtcttgttgattagtgattacatagcatagctgtcaggatattttacttgcttatgcctatcttatcaactgttgcacctgtaaattctagcctatgttaattaacctgccttatgtgctctcgggatagtgctagtagttattgaatcagtttgccgatggaattctagtagttcatagacctgcagattatttttgtgaactcgagcacggtgcgtctctctattttgttaggtcactgttggtgttgataggtacactgatgttattgtggtttagatcgtgtatctaacatattggaataatttgattgactgatttctgctgtacttgcttggtattgttataatttcatgttcatagttgctgaccatgcttcggtaattgtgtgtgcag

SEQ ID NO: 124 - DNA, 2785 bp, Oryza sativa
  misc_feature 1..2785: note = UBQ1 (RUBQ1) promoter
  source 1..2785: mol_type = other DNA
ctgcagaaatgcaaatttcataaaacaaactactagtactgtttgttcattggtcttatccaaaacttagccactgcaacaagttcttgaaccttagcacaatcatattgtgcatgcacttgtttattgcaaagaatggtgcgtagggaacacgcatgatttttgaattgctggcacataattttatcattagaaactggaatgcaacatgtaccctttgtcatggtttctttccgagacattgcactgttttttttaatcctatcattatcataatgccaagaactggtcaccaaccagcattttgcatcatggttagttgagctgtccccatgtatcaataggtgcattgtattggtccaaaatataaatgcagtggatgcaacctatctcatggccgtcaacaaaagaaatcaaaagggaaatgcaccatcttatatctccagtttatatgaacagattggataagatcataagatcaagtggtttatattattttgaggaatataacatggattcatcctaatcactcgtctaggcagtatgtgtattcatgatggatatggtactatactacggagttttttcttcacaaaataacctgttattttgacctccaaccaaacacgaattataccaaaaattgggttatttcatctatagtacaactctattataaacatgcagtaaattatcctacacatataccaaaattcaagtgtaataatcctaatacacagacttaaaaatcaaactatttcctttttaagatatggaaaaccatttttttaacggaaggaaaacaaattcgggtcaaggcggaagccagcgcgccaccccacgtcagcgaatacggaggcgcggggttgacggcgtcacccggtcctaacggcgaccaacaaaccagccagaagaaattacagtaaaaaaaagtaaattgcactttgacccaccttttattacccaaagtttcaatttggaccacccttaaacctatcttttcaaattgggccgggttgtggtttggactaccatgaacaacttttcgtcatgtctaacttccctttcggcaaacatatgaaccatatatagaggagatcggccgtatactagagctgatgtgtttaaggtcgttgattgcacgagaaaaaaaaatccaaatcgcaacaatagcaaatttatctagttcaaagtgaaaagatatgtttaaaggtagtccaaagtaaaacttaggggctgtttggttcccagccatactttaccattacttgccaacaaaagttgccacaccttgtctaaggtgaggtgatcaaattgttagccacaacttactaagcctaagggaatcttgccacacttttttgagccattgacacgtgggacttaatttgttagagggaaatcttgccacaactgtggctacaaccaaacacctgtcaaatttgcctaaccttaggcgtggcaaactgtggcaaagtgtggcttacaaccaaacacacccttagataataaaatgtggtccaaagcgtaattcactaaaaaaaaatcaacgagacgtgtaccaaacggagacaaacggcatcttctcgaaatttcccaaccgctggctggcccgcctcgtcttcccggaaaccgcggtggtttcagcgtggcggattctccaagcagacggagacgtcacggcacggactcctcccaccacccaaccgccataaataccagccccctcatctcctctcctcgcatcagctccacccccgaaaaatttctccccaatctcgcgaggctctcgtcgtcgaatcgaatcctctcgcgtcctcaaggtacgctgcttctcctctcctcgcttcgtttcgattcgatttcggacgggtgaggttgttttgttgctagatccgattggtggttagggttgtcgatgtgattatcgtgagatgtttaggggttgtagatctgatggttgtgatttgggcacggttggttcgataggtggaatcgtggttaggttttgggattggatgttggttctgatgattggggggaatttttacggttagatgaattgttggatgattcgattggggaaatcggtgtagatctgttggggaattgtggaactagtcatgcctgagtgattggtgcgatttgtagcgtgttccatctagtaggccttgttgcgagcatgttcagatctactgttccgctcttgattgagttattggtgccatgggtgggtgcaaacacaggctgcaatatgttatatctgttttgtgtttgatgtagatctgtagggtagttcttcttagacatggttcaattatgtagcttgtcgtttcgatttgatgctcatatgttcacagattagataatgatgaactcttttaattaattgtcaatggtaaataggaagtcttatcgctatatctgtcataatgatctcatgttactatctgccagtaatttatgctaagcactatattagaatatcatgttacaatctgtagtaatatcatgttacaatctgtagttcatctatataatctattgtggtaatttctttttactatctgtgtgaagattattgccactagttcattctacttatttctgaagttcaggatacgtgtgctgttactacctatctgaatacatgtgtgatgtgcctgttactatctttttgaatacatgtatgttctgttggaatatgtttgctgtttgatccgttgttgtgtccttaatcttgtgctagttcttaccctatctgtttggtgattatttcttgcag

SEQ ID NO: 125 - DNA, 2499 bp, Arabidopsis thaliana
  misc_feature 1..2499: note = UBQ1 promoter
  source 1..2499: mol_type = other DNA
tcaattaaattatccataaaatcactactttaaccctaacaaaaattcagactattaaagcaaattctgatccgtctctttcgctagctaaaggtaaaaggcggaacaacaaaagaaaccctagcttccctttgtacctctctctgttccaaaccatggtaagtttgtctaaagcttataattaattttcatggatttagtgattaagaagatatataatctgtaaatccatttctggtattgtgtggtggtctgaagtgagaaaatgtttaataagcaatccttattcttcgaatttcgatctgagatcatatgaattttctgagacattggattttttttgtgtggctctagcgttgagttatcaaattgagaagtttttattagatattgcaaatgcataatgctagtttttgtttggttttgtagtcgaagagaaagaccaaagagccaaaggttgagaatgtgactcttggaccagctgttcgtgaaggagagcaagtctttggagttgttcacgtctttgcttcattcaacgacactttcattgtgagtggcttctttatttttcaagcaaagttagatttttatgtacatttctgaacttcttatatctgcaattgcagcacgtgactgatttgtctggacgggaaacacttgttcgcatcactggtaatcatctctttcaactctcactctctaatcctttggtgatgatccctttgttaacttgtatgcggtagtctctgttgagtgtgaaatgaagttcttgactgcctaaaggttctgcttagtatctgctcttttaagttttttcgaggaatccgttgatatctttatagaaattgctttgttcttgacggcatcaatgttcctgcttatagaactaagttagttaccattgttattagtattatggtcttctctatagggtgtgagctgaagtgtctttagtctttgttcgtttaacttttgaggaattccttttgtttatctgtttggaaattgcattgttcttaaataacaatgggttgctaaaattgctgtttcgatttcctacttctgtaggtggaatgaaggtgaaagccgacagagatgagtcctcaccttatgctgctatgcttgcggcacaagatgttgctcagcgatgcaaggtaaaggcaaagaaattgcattaccaagcagacaacttgataatcttttatgtttctatatttaatcgatttggtgaatatatttatgcaacacaggaacttggaatcactgccatacatgtgaaactccgtgccactggtggtaacaagaccaagacccctggacctggtgctcagtctgctctaagagcccttgcccgttctggcatgaaaattggtcgcattggtaaaacagcagcaatcttcaactgtaattgtttaattgcatctttgattgaataaatctctgacattgttcttgttttcctcagaggatgtgactccaatcccaaccgacagtacccgcagaaagggtggaagaagaggaaggaggctctgagttatttggcctctcgttggatctccttatgtagctttctcaatgtttcattttgttttttcttagtttgaaaagagttttggaattactatgctttgttatagtctcaactctgaacagctttggatctttttctgtatgaccataagatattcaaaaattggtagtcattttatctcacaaaaaaaccttgaatttgtgctgtatgattttgtaaagtcttaggtgccaaatctttgattggagttgataaaatatttttatttggttgtaattttgtaatatcccgggatatttcacaaattgaacatagactacagaattttagaaaacaaactttctctctcttatctcacctttatcttttagagagaaaaagttcgatttccggttgaccggaatgtatctttgttttttttgttttgtaacatatttcgttttccgatttagatcggatctccttttccgttttgtcggaccttcttccggtttatccggatctaataatatccatcttagacttagctaagtttggatctgttttttggttagctcttgtcaatcgcctcatcatcagcaagaaggtgaaatttttgacaaataaatcttagaatcatgtagtgtctttggaccttgggaatgatagaaacgatttgttatagctactctatgtatcagaccctgaccaagatccaacaatctcataggttttgtgcatatgaaaccttcgactaacgagaagtggtcttttaatgagagagatatctaaaatgttatcttaaaagcccactcaaatctcaaggcataaggtagaaatgcaaatttggaaagtgggctgggccttttgtggtaaaggcctgtaacctagcccaatattagcaaaaccctagacgcgtacattgacatatataaacccgcctcctccttgtttagggtttctacgtgagagaagacgaaacacaaaag

SEQ ID NO: 126 - DNA, 2500 bp, Vigna radiata
  misc_feature 1..2500: note = VR ACS1 promoter
  source 1..2500: mol_type = other DNA
aacctctttaaactttaaattatctaacaattttcttatgactcacattgtgttgatagggtgattttgtcaaaatatatgtctattttatactagtatgatttgtctgcgaattatatatagtattaacttggagaaatgattgcctaataagttataaaaaaggagaaaatatttattcataaaaaaaatacacttaaataagtaacaataataaaaaacattatataagagattaagataatttaataagtattgaatgtagaataatttttatttataaatttgaactaaaatattcaaataatattcaaagtaaataatagatataattcatcattcaatacgagtaattcaatctattataatcatatattagataaatatacaaatatttgttaaattttacattattatattactaaatatatattaatttctttgaatatcttttatacaagtaggtagactagaagaattatcttatctcccgtatatttgtagatgttaaatgtaacgggcttagactgatgtttttgtattatattatttataaatccattagagatttaagttaatgtctctctttgattttaacatggttctaaaaattaggtttaatcattgcgtcctcaatgaacccatgctatatgttttaaagttttttgttttttgacaatgttttttatttctgagattgctcttaggattgaaattatgtttgatactagaaaacgaagaagtagagagtagtgtatacacgtgtaaaaaataatagttgtgggaacttaagttggatttgaatactaggacgaggctggaagggtttccactaagttgacaaaaattattacaagtggcaactagctaggtctcacaaagtattactaattaatagtgggtctgtctgcataccaactcttgcctaattttcaaacaccgcattctctcttcttctctccttcttcctctgaaacttcatcgatgtggacttctgtctctcaaaagtcaagctcaatttatccaatgcattataaatacacactctccctcccttctattcttcattgcatcacatttcctctataaattactcacaccttattcctaacttcatttcaacatcctctctcccacttacttcgatttcatcaattccaataaactcaacacacttttttacactccacactctaaccacatacaccatatgggtttcaaggccatggaccaaactcccttgttgtccaagatggctattggggatggacatggcgaatcatccccatactttgatggatggaaggcttatgatcaaaacccctttcatcccacagataatcctaacggtgttatgcaaatgggtcttgctgagaatcaggtataaaccgtataaaacttcattccaatctcatgcaattgcataaactattatttatctgctgctaatttacttatcttaaatttttgcagcttacctctgatttggttgaagattggatactgaacaaccctgaagcctccatttgcactccagaaggaataaatgatttcagggccatagctaactttcaggattatcatggtctggccgagttcagaaatgtgagttacaacacactgaaatttgatcacaaacactcactttatgcataaactagcaagttgagtttcactattgataacatttgacgcactctaactaaacgtgaattgcaaacttgcacaggctgtggctaaatttatggctagaacaaggggaaacagaatcacgtttgaccctgaccgtattgtcatgagcggtggagccaccggagcacacgaagtcactgccttttgtttggcagatcccggcgaggcattcttagtgcccattccctattatccagggtaatatattcaattcaatttttatttctatttttttttttcattatttttggggtattaatttagaagaagatgatgataatgaagtattcttatgtgtgtcatgacgtttctcaattagagtatatttgatctccaccgaaagaagtagcctctctattcatttaatattccattaaggtgcctagctccacttagtggaattctagattaggaaacagggtaatgagatttgatggcactacctttctctctctcacacatactttttataagggaataacattgtagtttcaaccttccattggaagcagtcaacgatcctatcaaataaaaaatgaaagcccttaaactaaagtcaaattcagaccacaattgaatagcagtttgatcatgaacattgttcgattattcattgtcaggccatcacagactttcttttattctccccattacaagaaaaaataaaccaagaaaaattatgttatcatataaattaattctattgacatgtacatcttcatatttgtttcttataagaatctgaatttcctaatgcagctttgaccgggatttgaggtggagaacaggagttaaacttgttccagtt

SEQ ID NO: 127 - DNA, 917 bp, Glycine max
  regulatory 1..325: note = promoter - Ubi(GMUBi); regulatory_class = promoter
  5'UTR 326..917
  source 1..917: mol_type = other DNA
cggggtgggcccaatataacaacgacgtcgtaacagataaagcgaagcttgaaggtgcatgtgactccgtcaagattacgaaaccgccaactaccacgcaaattgcaattctcaatttcctagaaggactctccgaaaatgcatccaataccaaatattacccgtgtcataggcaccaagtgacaccatacatgaacacgcgtcacaatatgactggagaagggttccacaccttatgctataaaacgccccacacccctcctccttccttcgcagttcaattccaatatattccattctctctgtgtatttccctacctctcccttcaaggttagtcgatttcttctgtttttcttcttcgttctttccatgaattgtgtatgttctttgatcaatacgatgttgatttgattgtgttttgtttggtttcatcgatcttcaattttcataatcagattcagcttttattatctttacaacaacgtccttaatttgatgattctttaatcgtagatttgctctaattagagctttttcatgtcagatccctttacaacaagccttaattgttgattcattaatcgtagattagggcttttttcattgattacttcagatccgttaaacgtaaccatagatcagggctttttcatgaattacttcagatccgttaaacaacagccttattttttatacttctgtggtttttcaagaaattgttcagatccgttgacaaaaagccttattcgttgattctatatcgtttttcgagagatattgctcagatctgttagcaactgccttgtttgttgattctattgccgtggattagggttttttttcacgagattgcttcagatccgtacttaagattacgtaatggattttgattctgatttatctgtgattgttgact

SEQ ID NO: 128 - DNA, 325 bp, Glycine max
  misc_feature 1..325: note = Ubi (Gmupri) promoter
  source 1..325: mol_type = other DNA
cggggtgggcccaatataacaacgacgtcgtaacagataaagcgaagcttgaaggtgcatgtgactccgtcaagattacgaaaccgccaactaccacgcaaattgcaattctcaatttcctagaaggactctccgaaaatgcatccaataccaaatattacccgtgtcataggcaccaagtgacaccatacatgaacacgcgtcacaatatgactggagaagggttccacaccttatgctataaaacgccccacacccctcctccttccttcgcagttcaattccaatatattccattctctctgtgtatttccctacctctccc

SEQ ID NO: 129 - DNA, 1992 bp, Zea mays
  misc_feature 1..1992: note = Ubi promoter
  source 1..1992: mol_type = other DNA
ctgcagtgcagcgtgacccggtcgtgcccctctctagagataatgagcattgcatgtctaagttataaaaaattaccacatattttttttgtcacacttgtttgaagtgcagtttatctatctttatacatatatttaaactttactctacgaataatataatctatagtactacaataatatcagtgttttagagaatcatataaatgaacagttagacatggtctaaaggacaattgagtattttgacaacaggactctacagttttatctttttagtgtgcatgtgttctcctttttttttgcaaatagcttcacctatataatacttcatccattttattagtacatccatttagggtttagggttaatggtttttatagactaatttttttagtacatctattttattctattttagcctctaaattaagaaaactaaaactctattttagtttttttatttaataatttagatataaaatagaataaaataaagtgactaaaaattaaacaaataccctttaagaaattaaaaaaactaaggaaacatttttcttgtttcgagtagataatgccagcctgttaaacgccgtcgacgagtctaacggacaccaaccagcgaaccagcagcgtcgcgtcgggccaagcgaagcagacggcacggcatctctgtcgctgcctctggacccctctcgagagttccgctccaccgttggacttgctccgctgtcggcatccagaaattgcgtggcggagcggcagacgtgagccggcacggcaggcggcctcctcctcctctcacggcacggcagctacgggggattcctttcccaccgctccttcgctttcccttcctcgcccgccgtaataaatagacaccccctccacaccctctttccccaacctcgtgttgttcggagcgcacacacacacaaccagatctcccccaaatccacccgtcggcacctccgcttcaaggtacgccgctcgtcctccccccccccccctctctaccttctctagatcggcgttccggtccatggttagggcccggtagttctacttctgttcatgtttgtgttagatccgtgtttgtgttagatccgtgctgctagcgttcgtacacggatgcgacctgtacgtcagacacgttctgattgctaacttgccagtgtttctctttggggaatcctgggatggctctagccgttccgcagacgggatcgatttcatgattttttttgtttcgttgcatagggtttggtttgcccttttcctttatttcaatatatgccgtgcacttgtttgtcgggtcatcttttcatgcttttttttgtcttggttgtgatgatgtggtctggttgggcggtcgttctagatcggagtagaattctgtttcaaactacctggtggatttattaattttggatctgtatgtgtgtgccatacatattcatagttacgaattgaagatgatggatggaaatatcgatctaggataggtatacatgttgatgcgggttttactgatgcatatacagagatgctttttgttcgcttggttgtgatgatgtggtgtggttgggcggtcgttcattcgttctagatcggagtagaatactgtttcaaactacctggtgtatttattaattttggaactgtatgtgtgtgtcatacatcttcatagttacgagtttaagatggatggaaatatcgatctaggataggtatacatgttgatgtgggttttactgatgcatatacatgatggcatatgcagcatctattcatatgctctaaccttgagtacctatctattataataaacaagtatgttttataattattttgatcttgatatacttggatgatggcatatgcagcagctatatgtggatttttttagccctgccttcatacgctatttatttgcttggtactgtttcttttgtcgatgctcaccctgttgtttggtgttacttctgcag

SEQ ID NO: 130 - DNA, 1536 bp, Oryza sativa
  misc_feature 1..1536: note = Ubi promoter
  source 1..1536: mol_type = other DNA
cacatcagtctctgcacaaagtgcatcctgggctgcttcaattataaagccccattcaccacatttgctagatagtcgaaaagcaccatcaatattgagcttcaggtatttttggttgtgttgtggttggattgattctaatatataccaaatcaatataattcactaccaaaatataccatagccatcacaactttattaattttggtagcttaagatggtatatataataaccaattaacaactgattctaattttactacggcccagtatctaccaatacaaaacaacgagtatgttttcttccatcgtaatcgtacacagtacaaaaaaacctggccagcctttattgggctggggctctctttcgaaaggtcacaaaacgtacacggcagtaacgcccttcgctgcgtgttaacggccaccaaccccgccgtgagcaaacggcatcagctttccacctcctcgatatctccgcggcgccgtctggacccgccccctttccgttcctttctttccttctcgcgtttgcgtggtggggacggactccccaaaccgcctctccctctctttatttgtctatattctcactgggccccacccaccgcacccctgggcccactcacgagtccccccctcccgacctataaataccccaccccctcctcgcctcttcctccatcaatcgaatccccaaaatcgcagagaaaaaaaaatctcccctcgaagcgaagcgtcgaatcgccttctcaaggtatgcgattttctgatcctctccgttcctcgcgttcgatttgatttcccggcctgtccgtgattgtgagatgttgtggttagtctccgttttgcgatctgtggtagatttgaacaggtttagatggggttcgcgtggtatgctggatctgtgattatgagcgatgctgttcgtggtccaagtattgattggttcggatctagaagtagaagtagaactgtgctagggttgtgatttgttccgatctgttcaatcagtaggatttagtctctgtttttctcgttgatccaagtagcagcttcaggtatattttgcttaggctgtttttgattcagtccctctagttgcatagattctactctgttcatgtttaatctaagggctgcgtcttgttgattagtgattacatagcatagctgtcaggatattttacttgcttatgcctatcttatcaactgttgcacctgtaaattctagcctatgttaattaacctgccttatgtgctctcgggatagtgctagtagttattgaatcagtttgccgatggaattctagtagttcatagacctgcagattatttttgtgaactcgagcacggtgcgtctctctattttgttaggtcactgttggtgttgataggtacactgatgttattgtggtttaggtcgtgtatctaacatattggaataatttgattgactgatttctgctgtacttgcttggtattgttataatttcatgttcatagttgctgaccatgcttcggtaattgtgtgtgcag

SEQ ID NO: 131 - DNA, 2500 bp, Oryza sativa
  misc_feature 1..2500: note = GAI promoter
  source 1..2500: mol_type = other DNA
accgtggaagccctagtcgatttagggatattttgggggatttgggttgaaatacattggtcagggcaagttatgcgcgaagatatatgtggaggaggttgagcacaaaagtgttgcctacgtggcatgtcatgttggcagtcaaacgtggtcaaaggacaattggaccggggtggtatattaaaccaagttcacggatctaaacatgcaattttcaaattcacggacctaagtgacaccacctcacaagtttaaggaccggtcatgtatttcactcttttgaaattatgcaactttttaaggagccacgatatatcatgttacaactcctttttttggaacataggaaaagctcacaaaatcctcagaaattccatcactcaaggaggcctaacaagatttccaaaatatatgttcacaatggaaaaaacaatccatggtatcaagttacattgagcttgtattatgctcaattaatccattaattgttagggtacatactcactcattagtacttaatattgcctacagtaagttttataacgagtccactcacttaaggacttgttatttcccatgatataatccatagtatcaaaggaacatagtatttgaacacaatctttacgtgcacacacctattagagaaacgggaactagaatccccatcttcggttgcttggggcacatccgtccccagatgcggcccctgtgggctgtccttagagcacatccaccttcgggcgcggccccctttgggctgtgatcagggtgcatctaccacatccgcctccggatgtggcaccctgtgggttgagcttagggcacatccccccggggggcgtggccctccgtgggctatgctcgaagtgcatctaccacatctgcctccgggccatatcgagacatatagatctacgccttcatggtatcaataacacgtcgccacatatgtgatctacatcttcatggtaccaagaagatagtcaagacctacaagatctacattttcaaggtgtttaagatgcagctcacgatttgttgcatctccttcacctcgtgtccacacgctctggagcttccccatgctcctagtcatacaagatgcctgttctcgggcacaaacagatgttgcgtagtccactttgagggcccatttttctattgcgcgatttatcaccctgttttggtgcatctgctccctggtcgaatctccgagggggaatacttgcttcccctcctacggagtctcacacttcgacaaacaactaaaaaataagtcagaaaaaataagaaaaaatgtatgtgtactttctatagtattatatctacgtgtaaaatgacattgaaagaaaaaaaattctaaaagatttattgtcttaaagttgtaagaatatttttacagttaaaatataatgaatttgatgttaaaactttgcaaataggtctaacactattgatagtatatgaatatttttttctagatttttttcgatatttgttagttagtatgcatagagtgtgtacgtgaaatttatatgcacaacatacgtttcctagtatcaaatcaactaaaggtcatatctactctttacctagactaatatagtactatgtagtttaaaattttataaccaaacttatcgttgcatttttatctgtcagttttgtaagatgcattggcataagttcatgagaaaccataaaatttccctaacgataaataaaaaaagaaacatttaagtattatatcgggcatagttatcttactccttttcgatcatactttggaagtagttttaagcccttatgagcttgataaaacatactccagtaattttaaatcgaacttttttaatgaaatgtctcccaacttaaaaagggtacaaagagatatcaggatgtaataagccgcaccttgggctacacagatcgcaggcacagactgggaaagaattcggctcgccgttgtcttccgagatggagaagtgagccgtaggcgtagagccgcatttctcatcactcctttttaattcgcggcgatttttggggtggtgggccgaagatttgtaactggatggtgaggtctgtctggtgaaaaggatggccgcgacgaatccgtacatcgatcgatccagcgctgtgcgtgtgtgggtggtgtgttggagagagaaaagggatgggagagaaggcaccggtagggcccaccgcgcagtgagagtctatagatagatgccttcctctctgatcacctgatgcccttcctcttctccccccttgctactactagttgcttgcctcttcccacctcacctcgcattgcaatctcgcatcgcctcttccttctcttcttccccttcttctccccttctcatccaacctcgcttcccaaccctggatccaaatcccaacctatcccaaagccgaaaccgaggagaggaaaaaggttacgcgcaattattactagctatagctaggtaggtttgggggaggcgagatc

SEQ ID NO: 132 - DNA, 607 bp, Panicum virgatum
  misc_feature 1..607: note = Ubi1 promoter
  source 1..607: mol_type = other DNA
ccactggagaggggcacacacgtcagtgtttggtttccactagcacgagtagcgcaatcagaaaattttcaatgcatgaagtactaaacgaagtttatttagaaatttttttaagaaatgagtgtaattttttgcgacgaatttaatgacaataattaatcgatgattgcctacagtaatgctacagtaaccaacctctaatcatgcgtcgaatgcgtcattagattcgtctcgcaaaatagcacaagaattatgaaattaattttacaaactatttttatttaatactaataattaactgtcaaagtttgtgctactcgcaagagtagcgcgaaccaaacacggcctggaggagcacggtaacggcgtcgacaaactaacggccaccacccgccaacgcaaaggagacggatgagagttgacttcttgacggttctccacccctctgtctctctgtcactgggccctgggtccccctctcgaaagttcctctggccgaaattgcgcggcggagacgaggcgggcggaaccgtcacggcagaggattccttccccaccctgcctggcccggccatatataaacagccaccgcccctccccgttcccc

SEQ ID NO: 133 - DNA, 692 bp, Panicum virgatum
  misc_feature 1..692: note = Ubi2 promoter
  source 1..692: mol_type = other DNA
gaagccaactaaacaagaccataaccatggtgacatttgacatagttgtttactacttgcttgagccccacccttgcttatcggttgaacattacaagatacactgcgggtggcctaaggcacaccgtccgaaaccggcaaaccaagcctgatcgccgaaatccaaaatcactaccggcaatctctaaagtttatttcatccttatatgacgaggaaagaaaagaagagagaaataatatcttaacttctaaatcagtcgcgtcaactttctcggctaagaaagtgagcactatcatttcggagaccatgtcatgagtgccgacttgccatatcttattatattcttatttatttaattataatcccattgcaatacgtctattctatcatggcctgccactaacgctccgtctaacgtcgttaagccattgtcataagcggctgctcaaaactcttcccggtggaggcgaggcgttaacggcgtctacaaatctaacggccaccaaccatccagccgcctctcgaaagctccgctccgatcgcggaaattgcgtggcggagacgagcgggctcctctcacacggcccggaaccgtcacggcacgggtgggggattccttccccaaccctccccacctctcctccccccgtcgcagcccataaatacagggccctccgcgcctcttcccaca

SEQ ID NO: 134 - DNA, 449 bp, Gossypium hirsutum
  source 1..449: mol_type = other DNA
agtgaagtagcagagataatagttattacagtagcagtaataaaataaaatacattttattacaaaaaaacgtacaagaggtccgcgaagatagccaatgagaacgcaagaagacaacccaattctcctatttttttattaaatatttctagaagaaagggtaaattacgccccacggtcacaaaactattaataagatcatatatttatcactcaacttccaaaagttacaaaatgattattaaactattcaaaagttttatttcaagtcattggattgttaaaatagcatttgtatggatttccctgttcacattgcctacatcaatcgaagcctctcattccccttcttttttatagattaagtttttttttataaaacaattttaaacatcatgaatctctgaactaaaatttaaataacttttttcttcgatctttgacattga

SEQ ID NO: 135 - DNA, 416 bp, Gossypium hirsutum
  misc_feature 1..416: note = uceApro2 promoter
  source 1..416: mol_type = other DNA
agtgaagtagcagagataatagttattacagtagcagtaataaaataaaatacattttattacaaaaaaacgtacaagaggtccgcgaagatagccaatgagaacgcaagaagacaacccaattctcctatttttttattaaatatttctagaagaaagggtaaattacgccccacggtcacaaaactattaataagatcatatatttatcactcaacttccaaaagttacaaaatgattattaaactattcaaaagttttatttcaagtcattggattgttaaaatagcatttgtatggatttccctgttcacattgcctacatcaatcgaagcctctcattccccttcttttttatagattaagtttttttttataaaacaattttaaacatcatgaatctctgaactaaaatt

SEQ ID NO: 136 - DNA, 1135 bp, Ananas comosus
  misc_feature 1..1135: note = SUI1 promoter
  source 1..1135: mol_type = other DNA
gacagcactacaggggaatatataagacatctaattcccgcactaaaccaaaaaaaaaaaaaattttaaagaaatattaaaaataataataaaaaatttaattttaaaaaacaaagatttaaacgtgcacggtgtgcgatccagatgcaccgcttctccgcgttatgcccacgcaaaagcgtggggccccaccagattctgttcccgcgtgcgagcatggaccacggtctatacaccgagtgctccaatattaatggagtactactcggaatagttttgttatttaatggcgtactaatttaaataaaatggttatttatgaattataacattaaaatacctttgaaaaaagaatttcttttagcaccaaatttgccattctattttttgaaattctaatttttaaattcaaaatcttagttatgcttctctctataataataattctaacgttttctcttttttaaagtatctactattaaaatctatcactagtgataaaaaaatatgaagcatttgatatgatatgtatatatcttacaacaaatttatgtgtgacaaatcacacattttaaaattttattattgaagtcctcgtaaaatcaacagttttaaaaagtatttttttttaaggaaaaaactctttaatttttttttaaatggaccgtgcaccttaaaaggtccccacaattgagttttcagagatcccggtctatataccgaggtccacggaacaaattctccatcgtgaaccgacctataacgtcgcgaatctcgatgcacgtcgcagtcgatcccgaccgtccaaccaaccgacaccatccgaaccgattattccaggagaaaaaggtcgccgcggtacactataccgcatattctcaatctcataatcctattccgcttcctcgtttaatcctaaccgtacatcatagcaccacccctgcgttatccgtccccggataactccttattcgcgggtatatcttattcccaccaccccgacctctaatctctcgctatatatagaaggtgaagggagaggccgagagtgttctacaaggagtggataataaaagctcttgccttttttcgcttcctcttcgtcgcgttctcttgccctaatccccccgatcag

SEQ ID NO: 137 - DNA, 2119 bp, Ananas comosus
  misc_feature 1..2119: note = L36 promoter
  source 1..2119: mol_type = other DNA
taacggagtaaaacccaaatcaagtcaaaaaaaggaatatgaggggctcgatgaacaaaatatgaaatttcacggagaaaaaaccgaaactaagtctaaaagtcgcctatgtgaggccttaacgcagaaaaatgaaacatccagatcgagaattttgcagtaaaactcaaatcaaatcaaaaaaagagggatttggggggtctcacaactcggcgggggtgacatcggtgagggccaatcgagcagtgcggatcttgtccttgaggaaggacgaggcctgcttcttgagctcgtagaagaagggggtgcccatggcaactcagcggagctcacactctcggcgacgacctcttcttcttcttcttcagagcccaaagggaagaggacgacgaagacgacgacgaagagggagaggagaatagagagagcaccgaggctttagcttagtcaaacaatcacacgtcgtagactcgtagttcgaattttgaatgcgcactttgtggatggtgttaacatctggtgggaacatttgcacttatgtccatgcaaatgttccaaatggcatgtttggggtcttcgcgtttcattcatacccctaacaaaatttgtgaaattgtggcagtatcttgcaaagttggtatctgcatgggtaaggatgcaaacggggcggatccgggggcgggagagttccaccacctcctacttcattttttatcatgacggggcggattcggggctggttactcttcattttatttttggctccaacttatcgctccattccgggcggatcggggtgggagccgaatttttgacggatcggagcggattgaaggaagaaaagagtcttccacctcccgctccatttacttggcggatcgggtcgaattcgggtcgaattcggggcggagctccaccaacccggattcatttgcatccctatgcatgggtgtacgtcattgcttttcaaaactgttgattgtttcacagttgaacaaacaactaaatgaaaagcattaggtggagaacaatgtgatgttaattttaatgagtgcctcactattaatttcaaggtcaaaggatgagggccaatggtatgttcaaggagcttttaatatattattatcaaatattaatttggtttggtggtttaggttaatgtggaaagcatgtagtcttgaagatgagatcaacagtgatgcaacatgcaccaggaaaataagtacaaggagagaacttgcatattggatataattatttactgctagtaaatcaccctaattttaaccaccatttcttcaagaagaagcgagggaatatatcaatccaatttggaacggacacgaattatctgacttcttttatcggtagtctggagtaccaattaactgtgctaaataattgcgagataattatatggctaaattacagaaaatttttctgtaaatacctactttttcacttttccttcataactttcaaaaacctacattttatccccttaaaatttcaagttgttgtattgagttccccttcgccagggttccattactattccgtctatttttttataatttacatcgaaaatgccttttaaaatgataaaaatatattaaaaaaatattttttttttatagaagaagtaaagataatttggtaattttgttctttccattaacaccatacctaggtttttgaaagtcagagaggaaaagtgaaaagcgagtatttatcggagaattttatgtaatttagcctaattatatggcataaataaatgactgataatattttggttaaagctgataatgggccatgtggaggcccattctcggcccacatatagatatttgggccgacaccaatcattttaaaagggttcgagtggtcgacaaccggttcaacaaggtcggaccggtcgaagtcctatcaggtccggttcggttgtcctatgattatttatatacctgtctctcgcgctctgttagggtttcttacggcgtcggcggctagggtttctgctgcagccctagtgtttgcgaggtagcgagcgcgctctcggatctccatctcttctcctcgcctctacctacatcatttgatctattcactcatcaat

SEQ ID NO: 138 - DNA, 1734 bp, Marchantia polymorpha
  misc_feature 1..1734: note = EF1 alpha promoter
  source 1..1734: mol_type = other DNA
caaatgagtcacacacattgttgagagacatatcaaaataactcaattgtaaggtaagttgatagatttcccagttaaatgcattattttaacaatatttgtatctcaaattttcaaaatcatatcaaatttgcagatcttgatgatgattcacaactctgtcttcgatttttgattgttaacgggtatcgatatttgggtaacttaaaaagaatttgctaaagatcttaaaaaacagattaaaaaaacctttcaaaatagctaatcctttaaatccgtttcacaatataatgctcattgatgataatcgaaaagattccattttaaagtgcatataaattgcttaattatctctttctgtctcgtaatattttgttctctcctattggatcggacccgcatcttctcgatcagttcactatactaatatttggtcaacttcaagagagattagaacttcgttctccaaagtgtaaaggccgacaagcagaaaaggaaacttcaatcagaagccttctaggttttcccgcgtcccaaaaagcgaagggaggacggggaggacggtgaggccagaagaagaaagcaacagtaaaatctcatgtgattgcgtgcatgtcatggatctatgggatgctagtccaccgtttggaagtatgtgcagaaggagaaaggcgcgggaggccaaaagcgacttcggccacctctctactttctagaaagtttgctcgcagcttgtaataagcgcggaaaaggtactcgaaaaaccggagcaatcggtgtggtatcagcagtcgggttcgctaaacctacgtcttcttattttggaatgttaaattgaaagggcgtgccggccctaagcacggacgatgtgacagacggaggagtgtgagcaattcggatgacgatgctggccggcagtcacgacaaagagtccgaaggggcatggacagggcaatatataaatggaaaagaggctttgaatattcctaacccttcgtcgtcggcctcccaacttgccctcgcatgctgaattggccgcctatctgcgaatggccggccgccgaccctaagtcgcaataacttgaacggagccgatgcaaagtccttatcgaacgctcgttattataaacggggcagacctaggtatttaattatatcaaaaccctccgcaatttcgctaatcattccctaatttcttctactttggcgtctagtgctgtggtcgcgcttgctctcaaagctcgctgggaggcagtggagcgtctggcttaaaatcgatcgccgcaaccctagagttcctttcacttctttctctcttgcgtggagagcatcgacatcgaagagctgcatcttgtcttctggtatgcgccttgtgccctcgtctctgtacgtcgttacgattgctcgatattgtgattgtctagacctgaaacccgactggagcttttacgtggtgtcgattggggcctcgagcgagtgattttttaggttcgttttagccaagtacatcccactttggtcagtcctgttatctcggtaaggtgttcagttcggtctctggtgcggaggtgcctcgtaagtttcctgcatgatagatttgtctatccttgacttgaagaggagtcgaaggtcagcgaggttggctgtgtgctatggacgtcggtgctccttggttccgtgcttctatgggtgttgcctcaacagtattgatgtgcctgcagaaaggttgtcacc

SEQ ID NO: 139 - DNA, 2000 bp, Brachypodium distachyon
  misc_feature 1..2000: note = EF1 alpha promoter
  source 1..2000: mol_type = other DNA
agatttgtgattgttcagctacatgctccttgaagcacctttattctactataaattagttcgttggacgagactattagaccacatgctagccatgcttgttcgtagttgtcttcaccgccattgcaaaaattgtcaataaatatttagagtgggtggcatcagaaaaacatctctagtggactctcttcctatcatagctactcgggctgtagatagaacgagggcacaagagttgggtggcgtaggtttactcgtgacctcaactcttttggctgtgtcttacgtctaagatgggtttggcatgtgagaaacataggtctaagcaattcatgttagggctgttgcattgttgttgcatcaaccaaatgtccagatagcagttcatgctacatctagttgaaaaccctcatcattaggcggaacatgtgttcttttttagcatagtcaaagtcagattgcggcactcgctcatccacggaaagaattttccctgtgcaggcatctcgatcaaaagacgcaaattaatttttgaatagcgatataacaatatctaattaacgtttcttgttttctgcgaaatgtctttcatcataaaatgagtcatctcgatgagcccaagtgacatagcccaacaccccaccccaccaataaaagtgaagaaaacatgttgggaaaactataccaagtaaaatacgagttgttctaaagaaaaagtaaagtacgagttagatcgcaccctgtcctggagtgtggcttgatgatccaactcctagcattgtatccctgtttttggatgatgtaactattatttacaatgaataaagaggtgttttactagtaaaaaaatcttgaggggaggagaaaataatggaggtcttttttcaaaccgatggactattatttttagtgaaagagaataatattattggaaaaattattctatccacttattttatattggcagaatacaaagaatggtggggtccacgcggaacttgcggcccccgaaacctatcgagggcgcggtacccaagcaaggaacggaggaaacttgcggggcccgaaacctagtgataaaaggcatatcatccacacgatgaagatctgacggaccatatctcccaccacggaaagccatcagacgaggatcagacggccaggaaggaaccctagcgcccgccggtgccaatataaagcgccactctctctcgtcttaagccccagcctctccattcccctctccctctcgccgccgccgtctccttctcctactcccttcgaggtgtgttgttcatccgtcccgaatccatccatcccctcttcagatgtgttgttcatggctctaatagctctagatctgcttgtttgtgttgtttagctctagatctactcgcgcgcgcttctctctcgatctcctgtagaacaattttggttggttttttgtgcatatccatggtaattttgtctgcaatatggaggaggctttctaagctcctacgtagcatcgatctttagaattccctcggtttctgtttatttcttcgcgagggctctctgttatctgtaggagtagctgtaagcgcggttcgttacggattaatcgtcatgcttagttgaacctatcggtcgaaggatttgtgtgggttgtcgtgtagaattgacaccatctacttactgtactgatatgccgatctgtaggatactcttcattacttttgtttactgctagttgtggtgtagatttagcattctcaaacccatgctgtagcgtttctaatattgttacatagatctaccggtgcctgttaattgtattcgatcgggcgtttctacatctgtccgcccacctagttttatatgtggtaatcaaaattgcgttgacttcgtgatgctgtctgtgtactgtttttaatcgctcttacttagatgatcaacatggtgatggttacgatttactgttttctaatccctgttacttcgatgctgcagtttcagcc

SEQ ID NO: 140 - DNA, 2500 bp, Brachypodium distachyon
  misc_feature 1..2500: note = UBI10 promoter
  source 1..2500: mol_type = other DNA
gaagaactcgagagggaattgcagatcatgaggcagatggctatttttgtgtcacatatgcgcaaaaagagaggctatatttgtgtccctaggttcttcgttgtattgcagtttccatatcaatctgacttggtcgcatgagaaattgatggttaaataatttgaatctctcatgtagtatcaactattagatattattttcaccaaatatatttccatcggagaagaagaggctacagaggaagcagaagagaggggtgggagaatttttacacttttgtacacccacttaaacagcaaaatccgtatgaaaacaggcccaccaaaacaatgccacgataacaatccgtagaaacaaaagcttcatttaacagcggcgcaacaaagcacgcttatccatggtagttgtagtccgtatgcgatccaaagatcacgattcacgcgtgacggacggacgacgcgtgccacaccacaactaacggcatccatggtagttgtagtccgtatgcgatccaaagatcacgattcacgcgtgacggacggacgacgcgcgccacaccacaactaacagcgtgagccagcgtccaaactccggatggcaacggggacgaaacccgtcgggtagtcactgcccaaacccgtccccgcaaccttcatcccaaacccgtccccgtttccggtcgcgggtttcagttttctaccagacccgtccccatcgggtttttcatccccgtcgggaaatccgaacccgccagcatttcagcaccaagccaaagttgcagcagcaacatgaataaaaaacaacccgtttcaacaccaagataaaacaaaacattataatttagacaacatttcacacgtataacaataacatatagttctcacatataacaacaccatttcacacataaaacaacaccatttgggataaaaatatgggctatatcaggccatttttatgggccatattgagttttcgtgggtttcacaggtaccggatttgtagaatgctgaaccgggtttgaaccgtaaaatccgcgggtattgaatttgacccaatcccgtcgtcccctggtggggtaaaaacaccatcttgagtccaaacggccaccaaccaaactccgacggcaacaaacaaacggcgttgctttgctcctcggtatctccgtgaccgctcaatctcccggctgtttccccggaattgcgtggactctctcatccacacgcaaaccgcctctccctcctctctcgtcctatccgccccggtgccgtagcctcacgggactcttcttcctcccttgctataaaatccccgccccctcccgtctcctctccacacatccaaactctcaatcgcaccgagaaaaatctcctagcgatcgaagcgaagcctctcccgatcctctcaaggtacgcccgtttcccgtcgatcctcctccttccgttcgtgttctgtagccgatcgattcgattcccttacacccgttcgtgttctctcgtggatcgatcgattgtttgttgctagaaggaactcgtagatctggcgtttatgaactgtgattcgggttagtccagatcgattcaggtcggtcgtcgttgagcctctcggctatgtctggattatcgtgtagatctgctggttcagttgattatgttcttctaggagtaatttcgttgggtcagcgcgatttctgcttaatctatgctgcttattgcgcctgtacctatctactaagctatgtgcacctgtaattttgctagattattcgttcatcctcgtagttggtttgtcacagtaatccgtatgggttctgacgatgttattgttggtcatacctaggcttctccagattttattttgttaaaattggatagatctgctactgatagttgatgatggaatttggtgctgaatctatgctatttattgcgcctatacctgatctatcgggctatgtacggctgtagtttactggattattcgttcatcctcggtagttggttcatcgtttgggttctgacgataatattgttgattatgcgtaggcttctgcagattgttgttaaaattggatacatcggttactgatggttgatgatagatttgtgctgaacctatctgtttattgctcctatacctgatctatagggctatgtatgcctgtaatttaccagattattcgttcatcctcgtagttggttcatctctataattcgtatgggttcttatgatgttatcgttgattatgcctagtcttatacagattattgtgtcaagattgaatatacctgctactgatcggtgataatttggttagtagtttgcaatctgctaggaacacgttaccactgtaatctgtaaacatggtttgccagagtagtttgttctactactcttgatatggttgctgattttagtcgcctccttttggatcatgtattgatgtccttgcagatttccgtgtacttaccccggcttttgtgtacttcgtgttaacag

SEQ ID NO: 141 - DNA, 1947 bp, Brachypodium distachyon
  misc_feature 1..1947: note = GLU1 promoter
  source 1..1947: mol_type = other DNA
accgacgatggtgttgagcaaaagttaggctacggcaatggctctggtagtcggtccttctgacatgtccgttggccttccaggttgggtttgcttcgttgttggggagtcggagtcgccagttcagaggagtgatgcgtgatgatgatgacttggtgtgaggtggtccgatctctgaggttcttgttcggcgctggccttacatattgcctctccgaagctcaccatcagaatcggcggctttgttcgcttgcgaggatggttgcctgtttggcatgggccgacacaagcttgcgtgcctacagtggaggagtcatttcttggacgttggtgggggaagttggagtcgccagctcaggaggagtgtttgtgtgatgatgatgacttttgcttgcaacctcgacggctctcttcgtctccgtgcattgagtgagtcagggtggtctttagtgcggtcatgttccatgacggtgctatggagattgtaacggtttttgtccggttttccgttaattaacggggcaattctattcctcttaattaatagacgaagtcctttggactccggttaaaaaaaaaatcaggaaagagcacgagcagacgaagaatacagcgtgcgtgaagaagaagcgtctgtgtgcgtggtgatgggctgggccttaacatactatttttttcatttttcaaaggggggttgtggcccagtttgacccttgtgtagctccgctactggatacctgaaaaatttcggtttacttcagaattgatagatgcttgccaaattttggagtgaggtcaggaaggaaatatcattacacatgtctatgctaataggtatgctaatattttctttgttctgtcatccaacatgagatagtttactgtttggttaacatgtatgggagagtaagccgataatgtggcaggtatgctatctgaaacagcttcttgccatgcatgataaaactgcatgcaagcttcttgggagagaagggagatcggccgatcgatagggccggaggggtcgggtgcgagtagattgtgaataactgtacagaaatggaggtccatcagactccgaaagcggccgcgggttcgcgtcccgtcggcccggttgacgatgaggcgtcaggtcgacgcaacaacacatttatgcttgactctccgtgagaagatccagcccatttatgaggctcattttttgtcactagtgagatgcataattgtgccatcatcctaacaaacttttcttcgtccatacatgtatttagttcccgtgcctacatggtcatcacacatcctctactttacaatttcatgatgtgtatagataggtatgagaatgaactcctgatcaagcaagctaaatatccaaatacatgattgtgcaacaactgaaaaaggtccttttaatcagtggcgtcgtataatcaacaacaatagaaagcgtcacgactaacaagtgtcatcaaccacagattacaaaagctacgacattataagatttaaactaaattaacaaaatctatcaacgttgtatagaaggaaaccgctctagataaaaagttgtataaacttcattgagaagttcgtaggtacatgtgaaaaggaataattaatcaaatgccatataatccatacaaccattttgagaatagagacacagaggatcatgaaagatagcacaaacatgtagtgccattttccatgtaagcgtgcaagcatgcacatatatagccttaccttgtgggcattgattatatctattggtcttttagattacgtccaaatgacaccttatttatcttctcatccatcttgataaaccttatctccacataacgtataagccacataaggcaagaaccccttttcttgcctataaaaatcacatagatcccacggtactgccatcaaccaaagcttctctcttctcttcaaacaatt

SEQ ID NO: 142 - DNA, 2100 bp, Oryza sativa
  misc_feature 1..2100: note = Con1 promoter
  source 1..2100: mol_type = other DNA
tcagataaaaaaatcgatacgatcatcggggttgtatgaattgttaacctagctagaaagattcagaatgtgtaagacctttcacatacatctactatggtacaactttacatatttagagtttaatcatgctgttctcttgcgtaagtgacacagattctgcgtatcaatggcgttagatattttctttgcggggaagggaggtgtcaatggcgaggcaccgcatcccatcgtgctcacagaaccggacaagagagaagcaactacaatgccatgctactccataattgtgatcggtggacggtggtgctggtactccctgatctcattgtgtcggcgtcaggatgtgccctgcaggtccatcaacaaccacaaaacatcacaacgtgccacaaaacgcacacctccggtcctaactatggtcctgaccatggatgatattatgggtctgtttggtttgctaccaacttattgtcctaccaatttcttagctaattcaatagtagcaaatacatgtttggtttgctatcaattttttgtcacaatagtttaaattcaatactacctaatttggtagtgccaaaacttgccaagattttggcactaccaagattttggtagggcaaaaattggattcaaaccaaacaagccctacctcttttgtttttttttggttttttaagtgggaggagtattagatgcaacacgtgttttgtgtttgatggtgaccctctccccctcctctcatcggatgattagccctgtttcactttcaccgtctacattctctcctttacactacttctactttcttcatcttaaaatataagaagtttagctgaaataagatacatcccagtactacgagacatcagaaagtgtcttatccaaccaaaacttcttatattttgggacggagggaatagcgctaaagctcaccgtagattttgctgccaaaacattgatcatagcagataggattgcaggtgggcaacacttcctatataaaaacagcttgctagttcattttatatatgatggtataaatttataaggaaaaaaaagaaatataagcgagataagtgggaaaaaacccatttgtctgcccctttgagtatctaatcgtacattgtttacatgctctctaagtttctcaacggtgcgtttcacatttcaggaaaagaaagttatataaagttttcttaggtactattttagagcaaactttcaactttttaataattccatattattcatcaagtttacacttttagacaactataagagaaatcagattactcgtcaatccaccgattacagctatctcaaacggagccataatcacacttcaatagtagtactaccacaattgcatgtaacaaaaaaaaaactcgtcaatggaatggatactattcaattttttttcataggaagggtatgtttagatcgcgaaatgaaaattttttgatgtcacatcggacgtttgaccggatatcggaagggattttcggacacaaatgaaaaaactaatttcataagtcgcttggaaaccgcgagacgaatcttttgagcctaattaatccgctattagtacatgtgggttgctgtagcacttatggctaatcatagactaattaggctcaaaagtttcgtctcgcgatttcttccttaactgtgcaattagtttttactttaatatacatttaatactccatacatatatataaagatttgatgttttacggaaaaaaaatttgggaacgggcctaaattgtttgtgaaaaaaaaaagcaactcgaatcttgcgatgcttcatgctttcctcctttcgaaacagaaaaggactaggcgcaaccacctcactcattttgtcttggcccatgggccgccacgtccgcatgacaatcacgctaccctccccgtcccgaataccgaagcctccagaacacggggggaccgcctcctgggccccacatgtcattctcacaccctccgtctccggcgagctccccctccctataaatcccgcctcccccatttctccggtcatctcgccgccaatagctcgccgccgtcgaaacccaaaatcttctcttcccg

SEQ ID NO: 143 - DNA, 303 bp, Arabidopsis thaliana
  misc_feature 1..303: note = TCTP 0.3 kb promoter
  source 1..303: mol_type = other DNA
ccaacactcgaatccccacccgttggaccaaacccggctcattaagcgtcggttcagatttatttcctttatttaaaaaaaaggaaagggtaaaaaatagaaaattggaaacagttaaagcccaaaattgtaatttaccgagaattgtaaatttacctgaaaaccctacgctatagtttcgactataaataccaaacttaggacctcacttcagaatcccctcgtcgctgcgtctctctcccgcaaccttcgattttcgtttattcgcatccatcggagagagaaaacaatcaataagcgacc

SEQ ID NO: 144 - DNA, 680 bp, Arabidopsis thaliana
  misc_feature 1..680: note = TCTP 0.7 kb promoter
  source 1..680: mol_type = other DNA
cccccttaccttatggcagagccgaattcttttgctgcgagacaagaacaaaaacagacaagaagaagaaatcgtcaatacacataaaaattctgagaaatttcgagaaaaaaaagtggacattgcaagcgaaactgttgattaacctttcaggatcaggctgaggaaattggccatggacgggggagaaaatttcacgagctcgtctaacagattttagactgagttttttcagtgactgagtttcgacctccctgttcaaagctatcatcgtcattctagggttttacacgaacaatcagaaacagaacgagaaagacggaagagaagagagggaaataggattttatccgacccgaacactatttatacgtagcccaacactcgaatccccacccgttggaccaaacccggctcattaagcgtcggttcagatttatttcctttatttaaaaaaaaggaaagggtaaaaaatagaaaattggaaacagttaaagcccaaaattgtaatttaccgagaattgtaaatttacctgaaaaccctacgctatagtttcgactataaataccaaacttaggacctcacttcagaatcccctcgtcgctgcgtctctctcccgcaaccttcgattttcgtttattcgcatccatcggagagagaaaacaatcaataagcgacc

SEQ ID NO: 145 - DNA, 1313 bp, Arabidopsis thaliana
  misc_feature 1..1313: note = TCTP 1.3 kb promoter
  source 1..1313: mol_type = other DNA
cagcgtttttagtgcagcagaagtttgtttgaaaagatactcttaagaggatacattactgaaacttgttttccaatcctaattatagacatatatgaatgaaactcacaactaatataaatagatatcagggaaactagaaaataggaaactagttttgtctcacaacaggaaaaacagataaaagaactacctggaagcgcaagggctttcaatggagccgtcttttcactgttatggtcagcaatacgtgtaggcttacttgcaggttctacgcctccaaatgcaacttgaatctatacaagtaacgtccaagtcattaacttttatattctacttgatgttcactaaaacgcttgatgcaaactaaacatcttactataaagatgagggtaatatgctagaaagcaaactcaaacaatagtagctgatgagaagaatctaactccagataaaaggtaaactataaaagtgataagccattgactgttcgatttacaccttataaaattttctcaggttcaacgtctctgaagcttgctataaagctatccattatcaaactcaaaacaaagaagaagcgaacaaaattttcaacacgatcaaagataaaatttaaaaaatattcgaaaacccccttaccttatggcagagccgaattcttttgctgcgagacaagaacaaaaacagacaagaagaagaaatcgtcaatacacataaaaattctgagaaatttcgagaaaaaaaagtggacattgcaagcgaaactgttgattaacctttcaggatcaggctgaggaaattggccatggacgggggagaaaatttcacgagctcgtctaacagattttagactgagttttttcagtgactgagtttcgacctccctgttcaaagctatcatcgtcattctagggttttacacgaacaatcagaaacagaacgagaaagacggaagagaagagagggaaataggattttatccgacccgaacactatttatacgtagcccaacactcgaatccccacccgttggaccaaacccggctcattaagcgtcggttcagatttatttcctttatttaaaaaaaaggaaagggtaaaaaatagaaaattggaaacagttaaagcccaaaattgtaatttaccgagaattgtaaatttacctgaaaaccctacgctatagtttcgactataaataccaaacttaggacctcacttcagaatcccctcgtcgctgcgtctctctcccgcaaccttcgattttcgtttattcgcatccatcggagagagaaaacaatcaataagcgacc

SEQ ID NO: 146 - DNA, 1990 bp, Arabidopsis thaliana
  misc_feature 1..1990: note = TCTP 2kb promoter
  source 1..1990: mol_type = other DNA
ttcttccatggtgcatgccactctggacggggccatctactaggcattctctccattaaagcagcagttgacagatttctgtaacacatagaggggaaatgatggacaaataatgaataactgaagcattgatacaagttagatgcatttcaggttaaataaatatggccaaatttaaatttcatgactctgaaccaccaattcaccttagtgcggctttatgtaccacctaggtatcgcaatctagatgtagtgtcgttatagagagtccataaaagtagataaggatgcgacacaaacctttcggaaaatgatccaggtgcaggaagaatggccgtgcttttgcctggattaccagtattgttccttcaattcaagaatcaataattatcagtatcaatcagcacgataagtagagcatcaatcacaaagacaaaacaggaataacattcttgagaatgtcgtaaattatttatactaactatatggactagtcacattccaaatgaaaatgtatactcacaagtctcttggcggtaaagttggaccaacaactaaagctttctctgttgcgctttttcgaagttccttggacccttttggacctgcggagaaaataatttggtctttcagaacgagaaacaatagtcatgaaaaaggctaaaagattacactaacagcgtttttagtgcagcagaagtttgtttgaaaagatactcttaagaggatacattactgaaacttgttttccaatcctaattatagacatatatgaatgaaactcacaactaatataaatagatatcagggaaactagaaaataggaaactagttttgtctcacaacaggaaaaacagataaaagaactacctggaagcgcaagggctttcaatggagccgtcttttcactgttatggtcagcaatacgtgtaggcttacttgcaggttctacgcctccaaatgcaacttgaatctatacaagtaacgtccaagtcattaacttttatattctacttgatgttcactaaaacgcttgatgcaaactaaacatcttactataaagatgagggtaatatgctagaaagcaaactcaaacaatagtagctgatgagaagaatctaactccagataaaaggtaaactataaaagtgataagccattgactgttcgatttacaccttataaaattttctcaggttcaacgtctctgaagcttgctataaagctatccattatcaaactcaaaacaaagaagaagcgaacaaaattttcaacacgatcaaagataaaatttaaaaaatattcgaaaacccccttaccttatggcagagccgaattcttttgctgcgagacaagaacaaaaacagacaagaagaagaaatcgtcaatacacataaaaattctgagaaatttcgagaaaaaaaagtggacattgcaagcgaaactgttgattaacctttcaggatcaggctgaggaaattggccatggacgggggagaaaatttcacgagctcgtctaacagattttagactgagttttttcagtgactgagtttcgacctccctgttcaaagctatcatcgtcattctagggttttacacgaacaatcagaaacagaacgagaaagacggaagagaagagagggaaataggattttatccgacccgaacactatttatacgtagcccaacactcgaatccccacccgttggaccaaacccggctcattaagcgtcggttcagatttatttcctttatttaaaaaaaaggaaagggtaaaaaatagaaaattggaaacagttaaagcccaaaattgtaatttaccgagaattgtaaatttacctgaaaaccctacgctatagtttcgactataaataccaaacttaggacctcacttcagaatcccctcgtcgctgcgtctctctcccgcaaccttcgattttcgtttattcgcatccatcggagagagaaaacaatcaataagcgacc

SEQ ID NO: 147 - DNA, 1195 bp, Jatropha curcas
  misc_feature 1..1195: note = UEP promoter
  source 1..1195: mol_type = other DNA
atctaacatattatgcgtcaatccatctctcctgtcaagcaaagataaatcgagtgtgtcagagtttgacttatagcactttctcgagcaaacactgaaattgaatcaagaatttctaagttaataacttaccgagattaacctggcgattatcggacgccaaaggtttaattagcattttgatttcccatttcttcaacggttgcccaagtatttcttttctcgttttcccttcctccggaaactttcccattggaaacggacgaggcatttccatgaaattcaccccttttttatcaggcggaggtggattaaaggaatcgaaaagtggaatttttttctttgatttcttcaacggagcctttccagtccatggtcggggtattgtaggtggagcgaaaggcaaaaaagccggttcacgaatagctagcggcttgactttaggagtctcggagtagctgtactgaaactcgaatggagccccaggaagctgataagaaatgccgttttcgccaatgacgaccgagcggtcgccatccgatgaaacgataccatctttgactggcttgtagtacttggttcgacggtgagggagcttgaaagctgggttgggagtggaagttttggaatttttggattttttaagcggtggagggtacttcgggatagggattggtggttgaggaggagaggcagatgatgttggatcgtttggaggcggtgatggcagtgaagagaagagattgatacctgaaaaagaagccacaattgtcattcttaatccaacaacagaaaactattcattagtggtttctcagtggtagctgagaggtttctttctcttttttcagttgcacagacagtagagtgaagaagatagcgggcgacaaatggatatgtgatgtggtattttcatgatattttatgggcgtcaaaatccatcaaaacgacgtcgttcaatctccgtataactccgaaacgtactagctaaaacgtcgccggtctagtaacttgatagatatccacgtgtctcaatatcataccccaactaaacactacattagaccgcaatgcactgaatcatccctgtgcaaaccctaaaggcatcaacacctcatatataaatccgctttactcatttcctccgctaccctaatgccttggattccctgcttcggctactgctcctctcatg

SEQ ID NO: 148 - DNA, 647 bp, Solanum tuberosum
  misc_feature 1..647: note = KST1 promoter
  source 1..647: mol_type = other DNA
ctagaaaatgaaatgaaaaacacctatctgttttttcactcaaattccatccttgcaataaaatgcttattcttaaaatttctatcttggtggagatcccaccaccattaccattttccccaaaaatcttacaacattatttccattttctttctcttaattctctcaacaaattccccttgcacctgaattattatcaaagaaaatcatgtttgccacttcaacaactttataactcatatctcgcctcgtttgttgtttattgtgtttcaatattgctatgttttcttctattttgtacttgcatttgctcactcgagcttttggtaacaatctctctacttctactagatctgcgtacagtctaccttctccagaccccacttgtgggaagatactatagaagtaggcaagtagcaatgtcacgttcttaaagctaaatgctttttcaaaagaatcacaataaagaaacacttgacccgtgtatcaccccaactacttcttcatctacatcctctatatataaacacgctaaaaataactagttagtatttttaaatattacacattgcctttccaagaaactcgaaaaaaaaaaaaaaaaaaaaaaaaccacatcaacaaaaaagaagcagcaatatataata

SEQ ID NO: 149 - DNA, 1039 bp, Citrus sinensis
  misc_feature 1..1039: note = CsCYP promoter
  source 1..1039: mol_type = other DNA
acgcactagcaactcctaatactggttcgatacactatcgacaccaatttaaaggacgtcgatcgcgtgattctagcgagagcaagccatcttcgtccctgagtccatcgagccacttcccaatcactggttccagccaaacaattgcactatcacaacattcaagatcgccacccgtacttctcctggttcccatcattgacggctctgtaatcaccacttttcgacaagtgcaatagccatggtgaaggatcaaactgtgtttggtttcaaaaatttcgccatttcaattaattgtggctttatttgaacaattaatttcggtgttatatcaatgtattattgtaactttatttgaacaattaatcttagtgtattatattttgaaactttaaacgtattattttagttttatttaaacaattaatttgtttaaattttattcaattttaaatttaattggtagtaaaattattttatattatatatttttttaatttcattagttcatggattgaggagaactaaaaattttaaattcgaaaactaatgtgctaaaggtagattagatatcaattaaattaaatccgcatccgatccgcaaacgtatagattggatatggattgagtcaaatctgtatccgattcgcaaatgtatggattggatttggattgagtttaatcaatccgtgaatttgattgaattgaaaaattataatccgtaatattattgatcagatataaattgatgtctaatccgtaaaatccgatccgcgaacactcctacctcagcctgggatccctcacataactctagtcaaccttaactcaacctcagttacttccaccccgccccacgatatccctccacgtgttccccctcaacggtccagattcactttttgttactcccccaccgctccatcccctatttaactgccccaaaaccctaaaaaattcgcccaaaaatcaccaaatcagaaatccgtgtttagtttgtttatttctctccaatcaaccaatcaaccaatcaaacatg

SEQ ID NO: 150 - DNA, 1091 bp, Citrus sinensis
  misc_feature 1..1091: note = CsGAPC2 promoter
  source 1..1091: mol_type = other DNA
cttgaacacaactgacaagacaaggtgagatgagatcactgtctcctatgccgacataatgtcaatatcgagattagatcacacaattcacattagatataaggtaagggatgacctcaagctccatccacaaatttcagattctctttgcccagctactagaaacctgaatgcaattttcgtatgcgttgactatttatctaagcccaccgtccgtgaccactgacttcatgctgcatgcaagatggcgtatcatatgatttctactaatttctcgggggaaaaaaaaattcatttggatgattcttcaataaaacatccttttaattaaacaaagacacgtattcaaaaaaaaaataaaaaattaaacaaagacattgtgcgggaaacaaggataattttaacttgttcacaaagccaacgtagaataattctagaggcgtagaataaaagttctagaaaaatggcatggaacgtttcaagttttgatttgttgctgcacaaactcaacggcaggcgttcttctattctttgttgtcaagctccgattggcctgtcgccaatactttcaacctttgacttttaccatggaaccgtcgaaagccaaagtccagtacgaccagacaggccttggcctttttggttgggtccgcggaaaatttttaagcccattgggaggatcatgcctctacaaaactcgaatattccgccaaaaaggaaatcctgattcccacgctccttttcctgcgcgtacgaacaccttctccaaaatctgtctgacaaatcagaactaactggcgcttgacgttcatacgctatacgatcgcgtggaactggttaacattaaaaactaaatcagcggctgcggacagggattaatataaccagcggcttcgatataaaagttactgactttcttttcgtccaagaaaaataaaaattaaaaaaaacagtcacgtgacccccaccactccctctcccctttaaataaccctctaattaatcctcccatcgtcacaaacaacgcacccagcgaaaatcgcagcgttaaacaaaccttcactactttctcattttcgataatatacatg

SEQ ID NO: 151 - DNA, 1379 bp, Citrus sinensis
  misc_feature 1..1379: note = CsEF1 promoter
  source 1..1379: mol_type = other DNA
ctcacatcaaggtagggtccacacgagtaatcgaagacgcttcctgacaagacttcgtggtgcttgcctgtctcttaaatttatatccgaaacatacacaccctcctcagacgcgcgtgttcactgattccttggacattacaacgataattcacgaaacggacatcgaagcgagtgggataagagggacaaaaaagaaaataagaaaaagaacgaatcccaatctcccacggccattataaaatttataatattaggctttagtaaaaaggaggacacgtaggtaattccaatagcacgtaagggtatattcggaaacaggagatataaaattctcgtataaaactagccagcaaaccctatacgagatatcagctctctctgccctgaccagtctctttctatcgcttgcggctagggttttagcagagctctttcaggtccaatttttcttctttttgatgagtgaacaaattaaattttttaattgcatttctgtttatttttctataagttaatttatgacgagaagttcatttgattcttgcgatttgaattgtgttcgttgttttgatgtagtacgaatgcttccttcttgtattcaatgatttttgtcaatatgttgatcttgaatcgtttatttgaacatatgttgactttgaatcgtttaatctgattttattttcattatagatgattttggcatctttttaaataacatatgcgcattttattttccttttcggttatttgctctagttagattaactttttaatttttatatacgttcggtgatattgtaccttagctgatttaaaaataataataatctatgatgtgttttttttatttattattgatcagattctgattttgtttgattttcaattttattagtctgttgtttcagtttttgtaattattttctgctcttttggattaaaaatgttgattgatctgattcatactgtgttgatatattttatttttgtaatttttggtttgaattataacatgattacctgctgagtatgttggatgtgtgtcccttcttctatatatctgtgtgatacaaacagagtttactgtgccatgtgtgtgattgctgagtttctttttcttgattgtatgtgtgtgtgtgtgtgtgtgtgtctcttattagcttttaattttgtgtataagttggcactactgttaaaacaattgtttgggtccctgaaggctcgtttgatatgatacagttaaatgaagatgaaattgtccttcaaattttgggctaaattgtttgagatattgttgaagtttgtgttctgcccaagcaaatttttctaacttgaacttttccttggatacagttttaagcaaatactttaccatg

SEQ ID NO: 152 - DNA, 2191 bp, Arabidopsis thaliana
  misc_feature 1..2191: note = AtSCPL30 promoter
  source 1..2191: mol_type = other DNA
ctaatctcaatgtttccgcctttccggtaacttaaatgagatcggaaaatatgtaattatactaacaacacgtctcaagttcgggactttgtggtctagtgataaagagatgggtttgaggcatcaacacttctcaagttgtgtgaaactccaacacattgtttctggataaccatatggatctgaagccttgcttacggccatttgaatatctgaaaagagggtatatccatagtgttctactgttctctatagacgtaggacttaccttgagttatccaaaaaaaaactatagtaacaacacaaaaattacctaaaataaaccttattttatcattatgatttaatgtaaaatcagaatcaaattactttcggcatcagagaccagctttttatcacccactgaattttacgaatcaagacttatatggtagactattaaacacaaatatatccaatgagagcatagaagatccgaaaatcatgacttccctctcactcatcaaacaaagttggagtctatgtcataaaaaataatcagttttcttttttcttttttttttcgaacatcttctaaacatgttttcaaattattgccgagactaacagctgtcaagggaactacgcaagagtaaaatgtgtgcatatttacgattagtcaaatgaactaaagcgtaggcattaagtgaaatatatatattttagttttgaccaacgtggttttaaatcactcagttatttaattattccatgcgttagtggtatatcaattcgttgtttggtaaagttcctacacactcactactcagttgaatagttaccaaaaaaaaactacaattcacaatctatacatagaatttatatggtcagtatgtattaactcaaaagtgggaaaacatgtcttctttttaattatctcttatgtgcataatttttctttgttttcctctcgtactttctgctttcgatcatttcagaaaaattatacaagctccgctattttactaaaaagtattaaatttataccgtacttgttacgttttaaattttgttaaaacgaacacaaatgtttggagacatgtatatgtgattttaaatggaaaacatcaagttatattatatagaaagtaaaatatcgttttttatttctgatttatcaatataatcatatagaaaaattagaatgtactactatcaaaattatggaaacctactgcatatggagttagagtttactttacaaggaatttaaaattaatattaataaaaaattttaacaattttaagtttcggtttattataaattgagtacagttactcattttgatactcctgcaaataattttgaaaaccctattatgataagtcgatcaatccgcctaatttcttacggattaaagcaatctacagaaaaataaaacaacattactactctaattgcatatgattgctagagagcgcataaggctaagtcgtaaagagaaacaccgattccgaatccacgaaactcaaaatattttgtggaattgtcacataaccaaaaatctggaatcctcatcctacttgccacgaacatatctatccgagacttgtccacaaaaccacgagagagaagccgaaaactaacacaaaaatgcataggcaaccgtggacttcttcactagctcatcgagatagcaatgccactagctaatttcttacgttgtatcttatttgttttactttggggcatgacatggttaaaccccatcaaagagaaagtgtttcatccactagtcaatatacgaattcattcgaatttatccctgtaaatcctagttcttaggatgaactggtgtaataaacagcaaaaaaaaaaaaaaaaaaaaaaatctggaatcattcgaccacctcaataaactaaagctaccaattaccacaatatagtcttccatatccacttagatataaaagataaaagtaaacaaatattaaatttcatatgcacgcataggaaactcatgatcttatcttttaaatagacatctagttttcttaggttataaatagacattttgtcctagaacttcttcactactaaaaccttagcctcaaatggataatcacactaagagcttctctagtctattaatttctttgtggtttactgctcttttaatattagtagaaatggtttcatgtgcgagacaac

SEQ ID NO: 153 - DNA, 1093 bp, Citrus sinensis
  misc_feature 1..1093: note = CsGAPC2 promoter 1 (GenBank MN097541.1)
  source 1..1093: mol_type = other DNA
cttgaacacaactgacaagacaaggtgagatgagatcactgtctcctaatgccgacaataatgtcaatatcgagattagatcacacaattcacattagatataaggtaagggatgacctcaagctccatccacaaatttcagattctctttgcccagctactagaaacctgaatgcaattttcgtatgcgttgactatttatctaagcccaccgtccgtgaccactgacttcatgctgcatgcaagatggcgtatcatatgatttctactaatttctcgggggaaaaaaaaattcatttggatgattcttcaataaaacatccttttaattaaacaaagacacgtattcaaaaaaaaaataaaaaattaaacaaagacattgtgcgggaaacaaggataattttaacttgttcacaaagccaacgtagaataattctagaggcgtagaataaaagttctagaaaaatggcatggaacgtttcaagttttgatttgttgctgcacaaactcaacggcaggcgttcttctattctttgttgtcaagctccgattggcctgtcgccaatactttcaacctttgacttttaccatggaaccgtcgaaagccaaagtccagtacgaccagacaggccttggcctttttggttgggtccgcggaaaatttttaagcccattgggaggatcatgcctctacaaaactcgaatattccgccaaaaaggaaatcctgattcccacgctccttttcctgcgcgtacgaacaccttctccaaaatctgtctgacaaatcagaactaactggcgcttgacgttcatacgctatacgatcgcgtggaactggttaacattaaaaactaaatcagcggctgcggacagggattaatataaccagcggcttcgatataaaagttactgactttcttttcgtccaagaaaaataaaaattaaaaaaaacagtcacgtgacccccaccactccctctcccctttaaataaccctctaattaatcctcccatcgtcacaaacaacgcacccagcgaaaatcgcagcgttaaacaaaccttcactactttctcattttcgataatatcaatg

SEQ ID NO: 154 - DNA, 914 bp, Citrus sinensis
  misc_feature 1..914: note = CsGAPC2 promoter2 (GenBank MN097542.1)
  source 1..914: mol_type = other DNA
tttcgtatgcgttgactatttatctaagcccaccgtccgtgaccactgacttcatgctgcatgcaagatggcgtatcatatgatttctactaatttctcgggggaaaaaaaaattcatttggatgattcttcaataaaacatccttttaattaaacaaagacacgtattcaaaaaaaaaataaaaaattaaacaaagacattgtgcgggaaacaaggataattttaacttgttcacaaagccaacgtagaataattctagaggcgtagaataaaagttctagaaaaatggcatggaacgtttcaagttttgatttgttgctgcacaaactcaacggcaggcgttcttctattctttgttgtcaagctccgattggcctgtcgccaatactttcaacctttgacttttaccatggaaccgtcgaaagccaaagtccagtacgaccagacaggccttggcctttttggttgggtccgcggaaaatttttaagcccattgggaggatcatgcctctacaaaactcgaatattccgccaaaaaggaaatcctgattcccacgctccttttcctgcgcgtacgaacaccttctccaaaatctgtctgacaaatcagaactaactggcgcttgacgttcatacgctatacgatcgcgtggaactggttaacattaaaaactaaatcagcggctgcggacagggattaatataaccagcggcttcgatataaaagttactgactttcttttcgtccaagaaaaataaaaattaaaaaaaacagtcacgtgacccccaccactccctctcccctttaaataaccctctaattaatcctcccatcgtcacaaacaacgcacccagcgaaaatcgcagcgttaaacaaaccttcactactttctcattttcgataatatcaatg

SEQ ID NO: 155 - DNA, 500 bp, Citrus sinensis
  misc_feature 1..500: note = CsGAPC2 promoter3 (GenBank MN097543.1)
  source 1..500: mol_type = other DNA
aaccgtcgaaagccaaagtccagtacgaccagacaggccttggcctttttggttgggtccgcggaaaatttttaagcccattgggaggatcatgcctctacaaaactcgaatattccgccaaaaaggaaatcctgattcccacgctccttttcctgcgcgtacgaacaccttctccaaaatctgtctgacaaatcagaactaactggcgcttgacgttcatacgctatacgatcgcgtggaactggttaacattaaaaactaaatcagcggctgcggacagggattaatataaccagcggcttcgatataaaagttactgactttcttttcgtccaagaaaaataaaaattaaaaaaaacagtcacgtgacccccaccactccctctcccctttaaataaccctctaattaatcctcccatcgtcacaaacaacgcacccagcgaaaatcgcagcgttaaacaaaccttcactactttctcattttcgataatatcaatg

SEQ ID NO: 156 - DNA, 2095 bp, unidentified
  misc_feature 1..2095: note = CsEF1 Promoter (GenBank MN097548.1 (Citrus sinensis isolate CsMDx8 EF1 gene, promoter region))
  source 1..2095: mol_type = other DNA
gaagcttggaaagtgctctgaaaatttctccttttaactagatttttcatttttgggtactttgttaatggtcgcactaaatttgtgggctagggccttgacttgtgtttataggcttaggagttttttgcctagttaattagtttacgttcacaaaattgctctggtcgtctgttgtatttcttagtagacagtagtaatgctatatgatttgacacatgtttgtacaggtacaaagattgcatctgagcttacgtggtatatgatgtggcttcattactaattgttatgtattaagtgattgtttattttatcttccaccgtcaggaagtgatttttctgaagtaacatgttttgccggattagttattttgttagtacactacgactaatttcttaatattacattcacgagtcacgacacccaattcgaatatttctaaatagaaatgagtaagatttactctcaaatatttatgaggaaaacgtttgcacctataggaaggaggcaggtaccaagtaatcactgatcacattgatacatttggttaaaaacaacgcaaaagcccattggattgtggttttaaatcccattaacactgggattttagttactgatttgtgtgtttggggaagagctgggattgagttagaaaatcagcggggtgtatttagttctattctgctctcaagtgaggcccacattccattacaactcacatcaaggtagggtccacacgagtaatcgaagacgcttcctgaccaagacttcgtggtgcttgcctgtctcttaaatttatatccgaaacatacacaccctcctcagacgcgcgtgttcactgattccttggacattacaacgataattcacgaaacggacatcgaagcgagtgggataagagggacaaaaaagaaaataagaaaaagaacgaatcccaatctcccacggccattataaaatttataatattaggctttagtaaaaaggaggacacgtaggtaattccaatagcacgtaagggtatattcggaaacaggagatataaaattctcgtataaaactagccagcaaaccctatacgagatatcagctctctctgccctgaccagtctctttctatcgcttgcggctagggttttagcagagctctttcaggtccaattttcttctttttgatgagtgaacaaattaaattttttaaattgcatttctgtttatttttctataagttaatttatgacgagaagttcatttgattcttgcgatttgaattgtgttcgttgttttgatgtagtacgaatgcttccttcttgtattcaatgatttttgtcaatatgttgatcttgaatcgtttatttgaacatatgttgactttgaatcgtttaatctgattttattttcattatagatgattttggcatctttttaaataacatatgcgcattttattttccttttcggttatttgctctagttagattaactttttaatttttatatacgttcggtgatattgtaccttagctgatttaaaaataataataatctatgatgtgttttttttatttattattgatcagattctgattttgtttgattttcaattttattagtctgttgtttcagtttttgtaattattttctgctcttttggattaaaaatgttgattgatctgattcatactgtgttgatatattttatttttgtaatttttggtttgaattataacatgattacctgctgagtatgttggatgtgtgtcccttcttctatatatctgtgtgatacaaacagagtttactgtgccatgtgtgtgattgctgagtttctttttcttgattgtatgtgtgtgtgtgtgtgtgtgtgtctcttattagcttttaattttgtgtataagttggcactactgttaaaacaattgtttgggtccctgaaggctcgtttgatatgatacagttaaatgaagatgaaattgtccttcaaattttgggctaaattgtttgagatattgttgaagtttgtgttctgcccaagcaaatttttctaacttgaacttttccttggatacagttttaagcaaatactttatcatg

SEQ ID NO: 157 - DNA, 2479 bp, unidentified
  misc_feature 1..2479: note = CsEF2 Promoter (GenBank MN097547.1)
  source 1..2479: mol_type = other DNA
gatttgtcggacctggacgtgatgctctcatatttaaataggaaaacaatgaacagccaaaggccgcctgttcttttatatctctcagcttcatttctgaaggaaaccatccatggccaaatgctgacaaataccatcttggtttaacaaatgttgctcgtgttgttgatacttctttaactgataactcataccttaaataacaacttttatgagacaaagcctcctaacttcctatctgtaactgtttgtttcttgctgtcgtgcttttgatgaagtgctgcttcttgacacattgaatgagtttgattttctaggaaagatgccagtctttttaaatatttgctgctgcttggtactccgttcaaaatagtaggagataaagaagcttggaaagtgctctgaaaatttctccttttaactagatttttcatttttgggtactttgttaatggtcgcactaaatttgtgggctagggccttgacttgtgtttataggcttaggagttttttgcctagttaattagtttacgttcacaaaattgctctggtcgtctgttgtatttcttagtagacagtagtaatgctatatgatttgacacatgtttgtacaggtacaaagattgcatctgagcttacgtggtatatgatgtggcttcattactaattgttatgtattaagtgattgtttattttatcttccaccgtcaggaagtgatttttctgaagtaacatgttttgccggattagttattttgttagtacactacgactaatttcttaatattacattcacgagtcacgacacccaattcgaatatttctaaatagaaatgagtaagatttactctcaaatatttatgaggaaaacgtttgcacctataggaaggaggcaggtaccaagtaatcactgatcacattgatacatttggttaaaaacaacgcaaaagcccattggattgtggttttaaatcccattaacactgggattttagttactgatttgtgtgtttggggaagagctgggattgagttagaaaatcagcggggtgtatttagttctattctgctctcaagtgaggcccacattccattacaactcacatcaaggtagggtccacacgagtaatcgaagacgcttcctgaccaagacttcgtggtgcttgcctgtctcttaaatttatatccgaaacatacacaccctcctcagacgcgcgtgttcactgattccttggacattacaacgataattcacgaaacggacatcgaagcgagtgggataagagggacaaaaaagaaaataagaaaaagaacgaatcccaatctcccacggccattataaaatttataatattaggctttagtaaaaaggaggacacgtaggtaattccaatagcacgtaagggtatattcggaaacaggagatataaaattctcgtataaaactagccagcaaaccctatacgagatatcagctctctctgccctgaccagtctctttctatcgcttgcggctagggttttagcagagctctttcaggtccaattttcttctttttgatgagtgaacaaattaaattttttaaattgcatttctgtttatttttctataagttaatttatgacgagaagttcatttgattcttgcgatttgaattgtgttcgttgttttgatgtagtacgaatgcttccttcttgtattcaatgatttttgtcaatatgttgatcttgaatcgtttatttgaacatatgttgactttgaatcgtttaatctgattttattttcattatagatgattttggcatctttttaaataacatatgcgcattttattttccttttcggttatttgctctagttagattaactttttaatttttatatacgttcggtgatattgtaccttagctgatttaaaaataataataatctatgatgtgttttttttatttattattgatcagattctgattttgtttgattttcaattttattagtctgttgtttcagtttttgtaattattttctgctcttttggattaaaaatgttgattgatctgattcatactgtgttgatatattttatttttgtaatttttggtttgaattataacatgattacctgctgagtatgttggatgtgtgtcccttcttctatatatctgtgtgatacaaacagagtttactgtgccatgtgtgtgattgctgagtttctttttcttgattgtatgtgtgtgtgtgtgtgtgtgtgtctcttattagcttttaattttgtgtataagttggcactactgttaaaacaattgtttgggtccctgaaggctcgtttgatatgatacagttaaatgaagatgaaattgtccttcaaattttgggctaaattgtttgagatattgttgaagtttgtgttctgcccaagcaaatttttctaacttgaacttttccttggatacagttttaagcaaatactttatcatg

SEQ ID NO: 158 - DNA, 1324 bp, unidentified
  misc_feature 1..1324: note = CsEF1 Promoter3 (GenBank MN097549.1)
  source 1..1324: mol_type = other DNA
tcgtggtgcttgcctgtctcttaaatttatatccgaaacatacacaccctcctcagacgcgcgtgttcactgattccttggacattacaacgataattcacgaaacggacatcgaagcgagtgggataagagggacaaaaaagaaaataagaaaaagaacgaatcccaatctcccacggccattataaaattataatattaggctttagtaaaaaggaggacacgtaggtaattccaatagcacgtaagggtatattcggaaacaggagatataaaattctcgtataaaactagccagcaaaccctatacgagatatcagctctctctgccctgaccagtctctttctatcgcttgcggctagggttttagcagagctctttcaggtccaattttcttctttttgatgagtgaacaaattaaattttttaaattgcatttctgtttatttttctataagttaatttatgacgagaagttcatttgattcttgcgatttgaattgtgttcgttgttttgatgtagtacgaatgcttccttcttgtattcaatgatttttgtcaatatgttgatcttgaatcgtttatttgaacatatgttgactttgaatcgtttaatctgattttattttcattatagatgattttggcatctttttaaataacatatgcgcattttattttccttttcggttatttgctctagttagattaactttttaatttttatatacgttcggtgatattgtaccttagctgatttaaaaataataataatctatgatgtgttttttttatttattattgatcagattctgattttgtttgattttcaattttattagtctgttgtttcagtttttgtaattattttctgctcttttggattaaaaatgttgattgatctgattcatactgtgttgatatattttatttttgtaatttttggtttgaattataacatgattacctgctgagtatgttggatgtgtgtcccttcttctatatatctgtgtgatacaaacagagtttactgtgccatgtgtgtgattgctgagtttctttttcttgattgtatgtgtgtgtgtgtgtgtgtgtgtctcttattagcttttaattttgtgtataagttggcactactgttaaaacaattgtttgggtccctgaaggctcgtttgatatgatacagttaaatgaagatgaaattgtccttcaaattttgggctaaattgtttgagatattgttgaagtttgtgttctgcccaagcaaatttttctaacttgaacttttccttggatacagttttaagcaaatactttatcatg

SEQ ID NO: 159 - DNA, 1477 bp, unidentified
  misc_feature 1..1477: note = CsEF1 Promoter4 (GenBank MN097550.1)
  source 1..1477: mol_type = other DNA
gatttgtcggacctggacgtgatgctctcatatttaaataggaaaacaatgaacagccaaaggccgcctgttcttttatatctctcagcttcatttctgaaggaaaccatccatggccaaatgctgacaaataccatcttggtttaacaaatgttgctcgtgttgttgatacttctttaactgataactcataccttaaataacaacttttatgagacaaagcctcctaacttcctatctgtaactgtttgtttcttgctgtcgtgcttttgatgaagtgctgcttcttgacacattgaatgagtttgattttctaggaaagatgccagtctttttaaatatttgctgctgcttggtactccgttcaaaatagtaggagataaagaagcttggaaagtgctctgaaaatttctccttttaactagatttttcatttttgggtactttgttaatggtcgcactaaatttgtgggctagggccttgacttgtgtttataggcttaggagttttttgcctagttaattagtttacgttcacaaaattgctctggtcgtctgttgtatttcttagtagacagtagtaatgctatatgatttgacacatgtttgtacaggtacaaagattgcatctgagcttacgtggtatatgatgtggcttcattactaattgttatgtattaagtgattgtttattttatcttccaccgtcaggaagtgatttttctgaagtaacatgttttgccggattagttattttgttagtacactacgactaatttcttaatattacattcacgagtcacgacacccaattcgaatatttctaaatagaaatgagtaagatttactctcaaatatttatgaggaaaacgtttgcacctataggaaggaggcaggtaccaagtaatcactgatcacattgatacatttggttaaaaacaacgcaaaagcccattggattgtggttttaaatcccattaacactgggattttagttactgatttgtgtgtttggggaagagctgggattgagttagaaaatcagcggggtgtatttagttctattctgctctcaagtgaggcccacattccattacaactcacatcaaggtagggtccacacgagtaatcgaagacgcttcctgaccaagacttcgtggtgcttgcctgtctcttaaatttatatccgaaacatacacaccctcctcagacgcgcgtgttcactgattccttggacattacaacgataattcacgaaacggacatcgaagcgagtgggataagagggacaaaaaagaaaataagaaaaagaacgaatcccaatctcccacggccattataaaatttataatattaggctttagtaaaaaggaggacacgtaggtaattccaatagcacgtaagggtatattcggaaacaggagatataaaattctcgtataaaactagccagcaaaccctatacgagatatcaatg

SEQ ID NO: 160 - DNA, 972 bp, Solanum tuberosum
  misc_feature 1..972: note = 16R promoter (GenBank AY070220.1)
  source 1..972: mol_type = other DNA
aattgttgtctaatcttggtagtagtaatcactacattggtgcttcacataccagagacctggattctcaaggcagagccatagtttgatattttggcgtctccgataagcatagattgactttggtctagcggtaagagcacctcaagtgaggatctcatgagtcgtctttctagttccagcacatggtagcgttttgcaccaatggtatttgcaaatttgttcttataacaatgtcataatgaaattttttgaataggccccccatcaagaaactagggattgaaagagagaattggatctctatttttacacataagagatttggaaaggtctattggttttttctattcaatttgtaaatgatcgtacatattgtaacgattaaaacaattgaagcatagtttaaagacttgccaaaagttgtttctcctcgagacaccatttagaaaatgacaattgttgtccatcaaatatgaattaagtttgcttatgaagcgatttttgggatactttaatgtagtgtgctttgtctctgctaaaatttgtaccagagacctcatgattttcaattgtttcactgaacacattacaattggaacttatgcttgataggcaataaataactgaggtcaaaatttgaagaccactttttatatgcaatttcttagttatttcacgttgatgtcatctagttcaaatatttttctcccgcgactctcttaatctttgtattcaacaaatgaacatttggacatagtcttacggggagaagggtggagagagattgttttcgaaaagaaaaaaaaaattcatacggaaggagcaataattaaaggaaaaagaaaagtagtttgaaaagtgcaaagaaattgctgtgtcttattggaccactactaggcccacctaaataaccaatctataaaggaaacagcccactacccatttcgcacgcacaaaaatcaaattgta

SEQ ID NO: 161 - DNA, 1239 bp, Solanum tuberosum
  source 1..1239: mol_type = other DNA
cacatatcaaatccaattcagtgttcggtattttcaaagctgaaattcatcgaaaaaagattacagagattttgttttgtgtgttagagtatagatcggaatcgacagacaaaagagggaaacttacaactgaatttcgccggagaatgagacggcgaagagttcaccggaagaagaaacggagattgcgagagccgaagaggctgggcctaattcaaaaatgggccaaaagtactcaaaaacatgggtcctgtatttggactatccatggataaaattaaaacaatagccacttttcaaaccacttaattgaaatatagtcatttgtataattaatcacgtttgtataattcaccacatttgtgtaatttgcaactaacaattcttcgtttaatttgtatttgtatacgatggtttgtatttgtatatgacgatgatttcctttggtttttcaattttgtcaccatgtacattcaatttttttgtgtgcaactttttaaagtttgtataaatgtgtagtttttggattttgtataacataatttatataatgtaatttgtataacacattttgaataattgtttaaagttcatatatttatgtttgtatcaatttatatttcgagttttatcatatttgtataattccaaactttatattactcaattatacaaaaacacgcgaattatacaaacatacctgcgaattatacaaattattgccctctctcgctcgcctctctcctccctctcccaatgctcgcctctctcctccctctcccaatctcacttgtcatttgtacaaatacatatgtgtaatatacaattatctaaccgatatacattgataattcacctctctcccactctctgccctctctctctcgctcgcctctctcctccctctcccaatctctcgctattctcctccctataacatgtagctacaaatcgtaattaacaaactatagctatgaaacttaattagactatttttgagtgactacatgtgaaagttcctctttctttaaagttgaagtgtgagtagtgtgaaggcccaaatgaggcaaagaccccatccataaagatggcccaagctaaccaccagcagtccggcccacatttgcagacaaataaaaccaaaatggaaggtggagaatttccaaaaccgctcattccattttctcaactttctctctctaaaacccctctttctctctctagaacacagaaccatca

SEQ ID NO: 162 - DNA, 1179 bp, Solanum tuberosum; identical to SEQ ID NO: 91
  misc_feature 1..1179: note = 20R promoter (GenBank acc. no. AY518222)
  source 1..1179: mol_type = other DNA

SEQ ID NO: 163 - DNA, 1529 bp, Solanum tuberosum
  misc_feature 1..1529: note = 5UGT promoter (GenBank acc. no. AY177376.1)
  source 1..1529: mol_type = other DNA
aatttaattgataatacttacctattaaataaatttcttaagataaatataaatacagaaaattgatttgaataatgctattcaagtcatagtggcaagattgaagtaaaaaaaaaaaagaaattgcattttattttatttagttttcaaatttagttcattatttagctcaaaatatatccaaattaagttaaaatttacaatgtcaataactaaaatataaagtttattttttttaaaaaaaagagaacattatatatatattgatccatagcatttaatgccataaaatttccgttaataaaagaaagagaacaacattccatgtggtggtcaatacatattcggtatatcatgtgacaattattaatgacgaatttaaaatttaaattttataaatttaaaactaacttattatatttttaaagttacaaatccataattactagtatatttattacaatttgaataatattttatatataaattaattttttacgttaaaaatattatattcaaaagaactcgatactatgacgttagatcagcccgtgatagatgcatcaaaatccatgcccaacttcaatctctacattgtatctggctatcctagattaggcagtagcttgccagaagtttttatttttataataattgaattaaaaaataataataacagaaacatattccagacaactcatgtcatgcatgacaaattctgaaattgggcttactggctactgctgaaaggtatggctcactaaccaaaataaaatactagtgcccacaacgagtgatggagtggtaagattactctgtctttagtaaagatctggaatttcaattttaaatatgaagaaaatttggttaggagtatcactcccaaatgagctttgcattgcacgattcgaatttaggcgaaggtccagcggtgagaaactaccaaacacaatccatacaatagtagaatttatttattttcttgcatcaatttgtttttctttttttagaccgtttgataaaaatgtcttttttcctttttgataattatttaatttttgattttttacatgatatatttaaaattagagaattaaagaacgttttagtacatatatttaatttaagattttaaaacttaaaagtcttattttcttttgtaaattacgtatcaaattaaaattagttaaataaataaaaacaaaatatttgttttgcaagtaagataaatagtcactctcttctgtccatctggtgttttttctatagaattaaataaattaaaagaaagaaacaaaaacgaagtaccggcaaaatttgtcttctcatcaatttcgtcacctcaaacgtcatatgacatgcatgtgtttaaatttggtcctcaaacatgttactcaaacgtagaaatggacatgatgggatagatattgaaatttttactaacgtaacgtgctcacccctacaaactccttatatatatccctctaactatcatcatatataccacacaataattaagagtcttacaa

SEQ ID NO: 164 - DNA, 900 bp, Nannochloropsis gaditana
  misc_feature 1..900: note = HSP90 promoter (Nga00934) (GenBank acc. no. AY177376.1)
  source 1..900: mol_type = other DNA
tgctcgaacaaagcgcaggaagcaacgaaggctgcttctttctttttcctcttgcgatatttcttgcaaggagtctgtaagacagcgacttgcttgcgagagcaacgttgtaggtaacatatactctctcgtgttgtactgtttattgacgtgcggtcagttctgtagggtttttggtgcagacaaggattttctcatgccgttgtgtgagtgtgtgggtggggcagggtgcactgtttttgacaccaaataaaaacaacccttgacacgaggaggccagtaatattttcccgtgtcgatgaagatatgtctgcccaggccttcgtcgtaatgttggaggtagtcattggatgtgaaatgatgggcgggttaaatacgaaaacatcttcgcccctatggaaggggaagggtggggggcaaatgaactcccgtcctattcccatgcccggccttcatcgagattcttactctgtttcctctatgtatacagaacagcctacacagattctttcggagtaagctaagagaagcaaccatgtctggcgatgccgaaacatttgccttctcggcggatatcaatcaattgctatccctgattatcaacaccttctactccaacaaggaaattttccttcgcgaactcatcaggtaggtgaaaattctcgtgctctgaacgcacagactctttttggatactgcagtctagccctgcacctctgatgattttctgtctgtctgagtcctttgcaccatcatgtgaggggcgctgctggtttctgtctagtgaagctagcctgacgggcgacaggtttaccgtttctttcaagttggatcactgagctcacagacccttcgcactatgacagcaattcttcggatgccttggacaagattcgttac

SEQ ID NO: 165 - DNA, 901 bp, Nannochloropsis gaditana
  misc_feature 1..901: note = EPPSII promoter (Nga02101)
  source 1..901: mol_type = other DNA
atatatcaaagtcgtaaggggggaagggatgtgttgggtgagaaatagagatgcagaaaaggcccaggaacgcccgcctcacggcagcgccttctgcacatgtgtccagccggtgaggggtgacatgaaagctttgcatctacattagcctctatagatcttagaacatgctcctgtggccaaaatttaagatcaacggtcgtgaattggtcatataattcctttaatatgtcgttgcctgatggctgcaggccttcaagtcctccagacgacaaggttgctcgtgcgacttttcgttcaataattgcaatgtgcggaagagggcagggttttctacggacaagtcgtgcaatgacatgttgaagagaaagatatgccatagtcaagtgacatccatgaaaggggggatggggacttagatcgaggtctggccacgctcaagataccactgcacccgcgatggacggcctcaagccggaaaggagggcgaggacggccaagtgccacctgctggcattgattttgagggttttggctttggagaatcggagaaggggaggctgagcggccgcagcgttgagattacggcatctaggacgggatatagagttgtaattaacagcttaattaacaacccgatcgcggagaatggcactcaaacgttacagaaagattaaacaccacatagcgtccaaagcgaaaggcagtgagggtccgcagacttaaaattttgggtgggacattcgagcatgaggcgctcggtggggagcaagaggaaaaggcgatgataacgccgctgcctgcgagctctcgagcgcgtctcccgcaagcctgaaaagaagacaggacttgaccgccggtgtcttccaaatacggccagactgaaggaggatatgccttg

SEQ ID NO: 166 - DNA, 900 bp, Nannochloropsis gaditana
  misc_feature 1..900: note = ATPase promoter (Nga06354.1)
  source 1..900: mol_type = other DNA
agaatatccagagaccagtcatccatgtgccatgtctcaagctttttcagttcgagttcatgaagcggacgatgatgaagaacagcatttgaaaggagaattctacgacaccgagggcagaatatctaccaatgttggcatgcagtctctggaagaccacaatcgtgaaatacagaggtatgagcggagggattggattgaaggggctcaggcgcgttgtcctgcaggaaagctgccccgaagatactatccagaaaaatggcagaacacgataattcgagactcacattaatcaatgcaatttttacagaaccatcgaggcattcaggagtgcctcccatactctgagcgtccgctccttgggctcggaaggaaattcgaagagccaagtgccaaatttgcaaagcgtgttcgacagcttgcagatcacttcacaggagggcaaggtatcttgagacgattggttggacaagaagggcgtgtctgaggccaagccctacctcgacgtctatcagatttaagaccgaagtcctgctcttgctgtggaggtgttcaagggtttgggctgccacgtcgtgggaggaaaggaaacagaagcagcagacgattcttgaacagctccattggcttgtgcctctggtgaccgatctagctcttggacagtgctcgaggacctcagcatggatcccatgtttctcgtaggcttgtgcttgttgatagatccggtctcttggtcaaatgttcggtggcagtgatgggctctgtagtcccctgcaagctctgccaattttctggaaaatctgttgcaatcggcaacaaatttaggttcatgtaacatccatcctatcttatgtttgcacctgtttttatcgataacgtcttcgacaggcagacgacagg

SEQ ID NO: 167 - DNA, 900 bp, Nannochloropsis gaditana
  misc_feature 1..900: note = EIF3 promoter (Genbank AZIL01000037.1)
  source 1..900: mol_type = other DNA
atggagtgttgaggtgaagtctagcatcgtaggggaaaacaggattctgtgtcttccattctactccttgataaagcgaagaaatccgacaaaaccaaagagattgttcaagtttaagatttgtaagcgtacaactatgaacttcttctctttgtaggcctgagtggtcgtatgcatacgattcatgaagtgaatcagtatcgctggattttgcttaggagtaaagcacaactaagaaaatatgctgcctggcaggcatcctgagacatgaggcaagcgacgtagcaattgaatcctaatttaagccagggcatctgtatgacctgttagttaattgatgaaccaatgagctttaaaaaaaaatcgttgcgcgtaatgtagttttaattctccgccttgaggtgcggggccatttcggacaaggttctttggacggagatggcagcatgtgtcccttctccaagttggtccgtgtggtagttgagatgctgccttaaaattctgctcggtcatcctgccttcgcattcactcctttcgagctgtcgggttcctcacgaggcctccgggagcggattgcgcagaaaggcgacccggagacacagagaccatacaccgactaaattgcactggacgatacggcatggcgacgacgatggccaagcattgctacgtgattattcgccttgtcattcagggagaaatgatgacatgtgtgggacggtctttacatgggaagagggcatgaaaataacatggcctggcgggatggagcgtcacacctgtgtatgcgttcgatccacaagcaactcaccatttgcgtcggggcctgtctccaatctgctttaggctacttttctctaatttagcctattctatacagacagagacacacagggatc

SEQ ID NO: 168 - DNA, 745 bp, Ankistrodesmus convolutus
  misc_feature 1..745: note = AcRbcS promoter (Genbank JF802127.1)
  source 1..745: mol_type = other DNA
cagcaccaccgcagcttagcgcccacacggagttgagggggccgccatgtcgcttgccgcgcgccccgcgcacgtcccaccacacgccgccgcctgccctggcacggcgcccccaccctggttagcctgctgcatgctgtcccctggccttccctctcctcgctgcactgagacatgtgcagcagcggccgcgctgggccatttgggagccctgtaagcctgcgaagggggtgggcccggctgttggcggcggttggcggtctggagcgcgcggcaggcagaccaggccccctgggccccgcggggcgcggtggatcgtcgctcagagccctatacagggaatggttgacaaacacggcggccgggggggcgccgtgccggcgcgatttgcgctgcaagcggcgcggcgctgctggcgggtgcgccgccgctggaggccctcggatggggccagcaccctgctaccggctcgcaagcacgagcaactggacaacgcggcggtcaggggcctgaacaggcggcagcatcgagagtgcggcagccccgtactgcgcccccggccaggccgccgcccagggacccctctcgatggactgagggacagcggtcggcggtcactgcgcgtgtggcacgcagcgccccgcccattgccggcctggcggccggcgcgcccgacgcggaagtcaaacgcttgcgtgcgcgcgcccgccggcgcgatatacgctccgccagccgcatggcgccc

SEQ ID NO: 169 - DNA, 261 bp, Chlamydomonas reinhardtii
  misc_feature 1..261: note = HSP70A promoter (Genbank JC486306.1)
  source 1..261: mol_type = other DNA
cgctgaggcttgacatgattggtgcgtatgtttgtatgaagctacaggactgatttggcgggctatgagggcgggggaagctctggaagggccgcgatggggcgcgcggcgtccagaaggcgccatacggcccgctggcggcacccatccggtataaaagcccgcgaccccgaacggtgacctccactttcagcgacaaacgagcacttatacatacgcgactattctgccgctatacataaccactcaactcgcttaaga

SEQ ID NO: 170 - DNA, 1425 bp, Chlamydomonas reinhardtii
  regulatory 1..981: note = promoter - ARG7 Promoter; regulatory_class = promoter
  exon 982..987
  intron 988..1425
  source 1..1425: mol_type = other DNA
gtcgacgaggaggaggtgcaagggggataccagcgcgtgtttctcagggcctgtgtgggacaccgaaacgtggtaaaagagacccgcccgcgaactgtgtatgtggagtagcgtggcgtgtgcggccggaccgacaaggcagcttgtggactgccccacgttgcagagtcagctgacaacgacacgtgcgccttcctgtcattgcccgtgcgcacgcacgtcctccgcactcccaacaaattgacagcgacacgtgcgccttcctataagcctatgcccgcacacgctcccgcgccctcaggtgtcgggccagaccacagaccggttggtccacgagtgcgaggaggatgaggcgggcggctgcggcggcgccggcggggcgccgcggcgaggaggacggcctgggactgggcatcacaggtgggtggcaggctggcagggactcacgcatgggccttgtacgtgactgcggttctgcatggctagtggctcacgcgctgcgcacgttcacgtacggcttgtgggcatgcagtgccttgacgtgaggctgcgctgccttgctgctgccgccttgccccgctccctgcacacactgcagccggcttcgggcgctacttcaccgcgggctacgagtgcgagaacgcgcagcagctcaacaggctgctggggtacaaggcgctgtgagagcgcgccgcagggggagtgtgttcatattgtggttgtttgggccgtgggcgcgggctgcatgtgcgtattgcacgcgtacagcattggtgactggtcaggtgtaagcggccggcagtgcgccgcgaggcgctgcagcgagttgtggggcatgcgtcatgcgcagacggcccctggacgacaaggcgttgagttggcgtttggaggtgtgggacgacgtggggtttgtgccgtcaaagcacagaacagaaggcgtgaccgttttacgagctcgtatgatgtagcatggattgaataatgacatgtgatttttgttacaagcgacgaatgcgtggggttttggatggcaggggtttcagtcgcccgattgcgcatgcacacgtgaccaaatttatgctcaacgacgtgaccattgctttatacatacttgtgtatcggttggcacttataacaattggctcgtcaaattgacgcgaggctgcacttcgatcctgaaagccccagttcaacaagtcggatagccaaatggccccgctcgctctccagcatcaaggggcctctaagtgcctcgcggcaacccagcgcaagtgtgctcgcgttgcggtgagctggactcgtgcacttgtcgacgccgtcggcaccgcaatcgaaagacgcgtgcgtcgagcaattgtggaagccgctgacgaattgtccgcatgtgacattgcaggctcgcgtccccgctcgtctcagcgtcat

SEQ ID NO: 171 - DNA, 981 bp, Chlamydomonas reinhardtii
  misc_feature 1..981: note = ARG7 Promoter
  source 1..981: mol_type = other DNA
gtcgacgaggaggaggtgcaagggggataccagcgcgtgtttctcagggcctgtgtgggacaccgaaacgtggtaaaagagacccgcccgcgaactgtgtatgtggagtagcgtggcgtgtgcggccggaccgacaaggcagcttgtggactgccccacgttgcagagtcagctgacaacgacacgtgcgccttcctgtcattgcccgtgcgcacgcacgtcctccgcactcccaacaaattgacagcgacacgtgcgccttcctataagcctatgcccgcacacgctcccgcgccctcaggtgtcgggccagaccacagaccggttggtccacgagtgcgaggaggatgaggcgggcggctgcggcggcgccggcggggcgccgcggcgaggaggacggcctgggactgggcatcacaggtgggtggcaggctggcagggactcacgcatgggccttgtacgtgactgcggttctgcatggctagtggctcacgcgctgcgcacgttcacgtacggcttgtgggcatgcagtgccttgacgtgaggctgcgctgccttgctgctgccgccttgccccgctccctgcacacactgcagccggcttcgggcgctacttcaccgcgggctacgagtgcgagaacgcgcagcagctcaacaggctgctggggtacaaggcgctgtgagagcgcgccgcagggggagtgtgttcatattgtggttgtttgggccgtgggcgcgggctgcatgtgcgtattgcacgcgtacagcattggtgactggtcaggtgtaagcggccggcagtgcgccgcgaggcgctgcagcgagttgtggggcatgcgtcatgcgcagacggcccctggacgacaaggcgttgagttggcgtttggaggtgtgggacgacgtggggtttgtgccgtcaaagcacagaacagaaggcgtgaccgttttacgagctcgtatgatgtagcatggattgaata

SEQ ID NO: 172 - DNA, 634 bp, Chlamydomonas reinhardtii
  regulatory 1..263: note = promoter - HSP70A promoter; regulatory_class = promoter
  regulatory 273..454: note = promoter - RBSC2 promoter; regulatory_class = promoter
  5'UTR 455..489: note = 5' UTR from RBSC2
  intron 490..634: note = First intron of RBSC2
  source 1..634: mol_type = other DNA
gacggcggggagctcgctgaggcttgacatgattggtgcgtatgtttgtatgaagctacaggactgatttggcgggctatgagggcgggggaagctctggaagggccgcgatggggcgcgcggcgtccagaaggcgccatacggcccgctggcggcacccatccggtataaaagcccgcgaccccgaacggtgacctccactttcagcgacaaacgagcacttatacatacgcgactattctgccgctatacataaccactcagctagcgatgccgggcgcgccagaaggagcgcagccaaaccaggatgatgtttgatggggtatttgagcacttgcaacccttatccggaagccccctggcccacaaaggctaggcgccaatgcaagcagttcgcatgcagcccctggagcggtgccctcctgataaaccggccagggggcctatgttctttacttttttacaagagaagtcactcaacatcttaaagtgagtcgacgagcaagcccggcggatcaggcagcgtgcttgcagatttgacttgcaacgcccgcattgtgtcgacgaaggcttttggctcctctgtcgctgtctcaagcagcatctaaccctgcgtcgccgtttccatttgcag

SEQ ID NO: 173 - DNA, 263 bp, Chlamydomonas reinhardtii
  misc_feature 1..263: note = HSP70A promoter
  source 1..263: mol_type = other DNA
gacggcggggagctcgctgaggcttgacatgattggtgcgtatgtttgtatgaagctacaggactgatttggcgggctatgagggcgggggaagctctggaagggccgcgatggggcgcgcggcgtccagaaggcgccatacggcccgctggcggcacccatccggtataaaagcccgcgaccccgaacggtgacctccactttcagcgacaaacgagcacttatacatacgcgactattctgccgctatacataaccactca

SEQ ID NO: 174 - DNA, 182 bp, Chlamydomonas reinhardtii
  misc_feature 1..182: note = RBSC2 promoter
  source 1..182: mol_type = other DNA
gccgggcgcgccagaaggagcgcagccaaaccaggatgatgtttgatggggtatttgagcacttgcaacccttatccggaagccccctggcccacaaaggctaggcgccaatgcaagcagttcgcatgcagcccctggagcggtgccctcctgataaaccggccagggggcctatgttcttt

SEQ ID NO: 175 - DNA, 575 bp, Chlamydomonas reinhardtii
  misc_feature 1..575: note = METE promoter (Accn. No. NC057006.1)
  source 1..575: mol_type = other DNA
tgtaggtcaggaccagagcctacaacattgtaaggccatgtatcctccagtgccatttgcgacgttacacgacgagacaatctgcgctgtgttcaagcacacacatccgggactcgtgtgatgtcttaacatctgcaaggaaacataaggtggccggcgtcacgcaagatgacgcgacggactcgaatgcttgcttcgtccagcgacaaataaggacaggcagggcgcctgcattgcgtgcgcttagaggcgaggcgctcaagacatttcggcagcaataattggtattgaggcacattctgcaccaggatgccaagaggtgaacgttgctgccttaatgtatatctgcacagctggccggttactgcgaaccgggtgccttttggagtcgctcctaaaagacgtcaccggcgcaacgtcgtcgtgcggccgtacaggtatgcaaaattggcccggttgcgcgcaggccgattatttaagtgacatttggtaccatgcatgagcatccgattgttgttttgcaattctgtctgactgcacaaggaacccgtccttgggaatcaacatctgtcaac

SEQ ID NO: 176 - DNA, 1206 bp, Chlamydomonas reinhardtii
  regulatory 1..919: note = promoter - NIT1 promoter (Accn. No. AF203033.1); regulatory_class = promoter
  5'UTR 920..1206
  source 1..1206: mol_type = other DNA
cccggggcacatccgggcatcccctacctcggcatatatactgcgcccctctcccaaccggggcgcagcagcagggagcaggtgctggtgtagggtaaggaaaggatctgacgcacatccatcaacgggtcaacaagcccaagcatctagatatgcacgccaggcttgcggttgaaggggcatcaggctcgaggcgagacgtcgagggcgtgggctctgtatggctgggtaacggtacgtataattccaggtacaagctagagcagacggtggtgagaagcattagaagcattgtcccgagtgtggtggctagaatcccggcccacgaatcacagtgaatgggtacatgtacaggtgccccgccagcccccgctcctctgctgcctctgatgcctcatgccaaaagtcctgacgcggcgccctcacatccccgtccgggtaatctatgagtttcccttatcgagcatgtacgcgatagtggacggggctcagggtggggggtgggtgggtgggaggggcgttccttcagacaccctggaggggtggctagaaaagcggccgcgcgccagaaatgtctcgctgccctgtgcaataagcaccggctatattgctcagcgctgttcggcgcaacggggggtcagcccttgggaagcgttggactatatggtagggtgcgagtgaccccgcgcgacttggagctcgatggccccgggttgtttggggcgtccgcctctcgcgctattctgagctggagaccgaggcgcatgaaaatgcattcgcttccataggacgctgcattgtggcttgaaggttcaagggaagggttcaaacgaccccgccgtacgaacttttgtcggggggcgctcccggccccgggctcttgtgcgcgcattagggcttcgggtcgcaagcaagacgatacaggaaccgaccaatcgatagtcttgtgcgaccgtgcacgtgtgcagcaatagttaggtcgataaccacgttgaacttgcgtctctcttcgtggcgcctcctgcttggtgctccacttcacttgtcgctatatagcacagcgttgaaagcaaaggccacactaatacagccgggctcgagagtccgtctgcgtttgcattgttggccaagggctgctttgtagccaaagccatacacgaagcttcacttgattagctttacgaccctcagccgaatcctgccagt

SEQ ID NO: 177 - DNA, 919 bp, Chlamydomonas reinhardtii
  misc_feature 1..919: note = NIT1 promoter (Accn. No. AF203033.1)
  source 1..919: mol_type = other DNA
cccggggcacatccgggcatcccctacctcggcatatatactgcgcccctctcccaaccggggcgcagcagcagggagcaggtgctggtgtagggtaaggaaaggatctgacgcacatccatcaacgggtcaacaagcccaagcatctagatatgcacgccaggcttgcggttgaaggggcatcaggctcgaggcgagacgtcgagggcgtgggctctgtatggctgggtaacggtacgtataattccaggtacaagctagagcagacggtggtgagaagcattagaagcattgtcccgagtgtggtggctagaatcccggcccacgaatcacagtgaatgggtacatgtacaggtgccccgccagcccccgctcctctgctgcctctgatgcctcatgccaaaagtcctgacgcggcgccctcacatccccgtccgggtaatctatgagtttcccttatcgagcatgtacgcgatagtggacggggctcagggtggggggtgggtgggtgggaggggcgttccttcagacaccctggaggggtggctagaaaagcggccgcgcgccagaaatgtctcgctgccctgtgcaataagcaccggctatattgctcagcgctgttcggcgcaacggggggtcagcccttgggaagcgttggactatatggtagggtgcgagtgaccccgcgcgacttggagctcgatggccccgggttgtttggggcgtccgcctctcgcgctattctgagctggagaccgaggcgcatgaaaatgcattcgcttccataggacgctgcattgtggcttgaaggttcaagggaagggttcaaacgaccccgccgtacgaacttttgtcggggggcgctcccggccccgggctcttgtgcgcgcattagggcttcgggtcgcaagcaagacga

SEQ ID NO: 178 - DNA, 650 bp, Chlamydomonas reinhardtii
  regulatory 1..467: note = promoter - HSP70A promoter (Accn. No. M76725.2); regulatory_class = promoter
  regulatory 468..649: note = promoter - RBSC2 promoter; regulatory_class = promoter
  source 1..650: mol_type = other DNA
gctccgcagggcacacgtcacgcgaagggccgcgacggttcgagaaccgacttgagggcgccaaacgagcccgagccgccgttgcgccaggcgaaaccagaaccgtagattaatgcacttgagctattcattggagcgatctgccggggacagcgggtctggcgtgcgcgcgattggagatcgcaaattacatatgtctgcgtgacggcggggagctcgctgaggcttgacatgattggtgcgtatgtttgtatgaagctacaggactgatttggcgggctatgagggcgggggaagctctggaagggccgcgatggggcgcgcggcgtccagaaggcgccatacggcccgctggcggcacccatccggtataaaagcccgcgaccccgaacggtgacctccactttcagcgacaaacgagcacttatacatacgcgactattctgccgctatacataaccactcaacgccgggcgcgccagaaggagcgcagccaaaccaggatgatgtttgatggggtatttgagcacttgcaacccttatccggaagccccctggcccacaaaggctaggcgccaatgcaagcagttcgcatgcagcccctggagcggtgccctcctgataaaccggccagggggcctatgttcttt

SEQ ID NO: 179 - DNA, 467 bp, Chlamydomonas reinhardtii
  misc_feature 1..467: note = HSP70A promoter (Accn. No. M76725.2)
  source 1..467: mol_type = other DNA
gctccgcagggcacacgtcacgcgaagggccgcgacggttcgagaaccgacttgagggcgccaaacgagcccgagccgccgttgcgccaggcgaaaccagaaccgtagattaatgcacttgagctattcattggagcgatctgccggggacagcgggtctggcgtgcgcgcgattggagatcgcaaattacatatgtctgcgtgacggcggggagctcgctgaggcttgacatgattggtgcgtatgtttgtatgaagctacaggactgatttggcgggctatgagggcgggggaagctctggaagggccgcgatggggcgcgcggcgtccagaaggcgccatacggcccgctggcggcacccatccggtataaaagcccgcgaccccgaacggtgacctccactttcagcgacaaacgagcacttatacatacgcgactattctgccgctatacataaccactcaa

SEQ ID NO: 180 - DNA, 182 bp, Chlamydomonas reinhardtii
  misc_feature 1..182: note = RBSC2 promoter (Accn. No. M76725.2)
  source 1..182: mol_type = other DNA
cgccgggcgcgccagaaggagcgcagccaaaccaggatgatgtttgatggggtatttgagcacttgcaacccttatccggaagccccctggcccacaaaggctaggcgccaatgcaagcagttcgcatgcagcccctggagcggtgccctcctgataaaccggccagggggcctatgttctt

SEQ ID NO: 181 - DNA, 178 bp, Chlamydomonas reinhardtii
  misc_feature 1..178: note = BetaTub2 promoter (Accn. No. K01809.1)
  source 1..178: mol_type = other DNA
ctttcttgcgctatgacacttccagcaaaaggtagggcgggctgcgagacggcttcccggcgctgcatgcaacaccgatgatgcttcgaccccccgaagccccttcggggctgcatgggcgctccgtgccgctccagggcgagcgctgtttaaatagccagcccccgattgcaaagac

SEQ ID NO: 182 - DNA, 823 bp, Chlamydomonas reinhardtii
  misc_feature 1..823: note = PSAD promoter (Accn. No. AF335592.1)
  source 1..823: mol_type = other DNA
ggatcccacacacctgcccgtctgcctgacaggaagtgaacgcatgtcgagggaggcctcaccaatcgtcacacgagccctcgtcagaaacacgtctccgccacgctctccctctcacggccgaccccgcagcccttttgccctttcctaggccaccgacaggacccaggcgctctcagcatgcctcaacaacccgtactcgtgccagcggtgcccttgtgctggtgatcgcttggaagcgcatgcgaagacgaaggggcggagcaggcggcctggctgttcgaagggctcgccgccagttcgggtgcctttctccacgcgcgcctccacacctaccgatgcgtgaaggcaggcaaatgctcatgtttgcccgaactcggagtccttaaaaagccgcttcttgtcgtcgttccgagacatgttagcagatcgcagtgccacctttcctgacgcgctcggccccatattcggacgcaattgtcatttgtagcacaattggagcaaatctggcgaggcagtaggcttttaagttgcaaggcgagagagcaaagtgggacgcggcgtgattattggtatttacgcgacggcccggcgcgttagcggcccttcccccaggccagggacgattatgtatcaatattgttgcgttcgggcactcgtgcgagggctcctgcgggctggggagggggatctgggaattggaggtacgaccgagatggcttgctcggggggaggtttcctcgccgagcaagccagggttaggtgttgcgctcttgactcgttgtgcattctaggaccccactgctactcacaacaagccaaa

SEQ ID NO: 183 - DNA, 590 bp, Chlamydomonas reinhardtii
  misc_feature 1..590: note = VIPP2 promoter (Accn. No. NC057014.1)
  source 1..590: mol_type = other DNA
gaggcagggagcaggaaggagtgagaaacagcacagaagggaaaggccgggtgtcggaaaaacgcgctccggaacggccttcctgaagctcgcgcacattcccaccctttcaccccgcaataaccgctcgccgctcgttgctaatgctgatagttgttgcgcacttgcgcccacgcgccggtgggacagccccggcaagccagatttctcaccggcgtcaccatccgcagccgcagcggcagcgcctgccaccagcagcgccgcaagtgccagcgccggcagaagcagtcccgcgcattggtgggttggcatggttgttttggcgggtgcgcgcaaagagctctggtagactacggcgagtcaagcggcgcggtcgcacggagaaaggtcgggccctggaaaagcgtttcggaagggggcgtcggtgcagctaggacggggaatgacgagaggtggctgctcgcgggggagcacagctgcaggccggccgcggacttgcgcggagctgcgccgggaggccgaggccgaccccccgcgccccatgcaaaaggcgaaggcccctgcgtaaattcgcgcacgccaaacttata

SEQ ID NO: 184 - DNA, 2859 bp, Chlamydomonas reinhardtii; identical to SEQ ID NO: 90
  misc_feature 1..2859: note = GPDH3 promoter and 5' UTR (GenBank No. MK163384.1)
  source 1..2859: mol_type = other DNA

SEQ ID NO: 185 - DNA, 987 bp, Chlorella vulgaris; identical to SEQ ID NO: 106
  misc_feature 1..987: note = CvNDI1 promoter(GenBank No. MN971585)
  source 1..987: mol_type = other DNA

SEQ ID NO: 186 - DNA, 999 bp, Chlorella vulgaris; identical to SEQ ID NO: 107
  misc_feature 1..999: note = CvNDI2 promoter(GenBank No. MN971586)
  source 1..999: mol_type = other DNA

SEQ ID NO: 187 - DNA, 819 bp, Chlorella vulgaris
  misc_feature 1..819: note = psaD promoter(GenBank No. AAL73208.1)
  source 1..819: mol_type = other DNA
gatcccacacacctgcccgtctgcctgacaggaagtgaacgcatgtcgagggaggcctcaccaatcgtcacacgagccctcgtcagaaacacgtctccgccacgctctccctctcacggccgaccccgcagcccttttgccctttcctaggccaccgacaggacccaggcgctctcagcatgcctcaacaacccgtactcgtgccagcggtgcccttgtgctggtgatcgcttggaagcgcatgcgaagacgaaggggcggagcaggcggcctggctgttcgaagggctcgccgccagttcgggtgcctttctccacgcgcgcctccacacctaccgatgcgtgaaggcaggcaaatgctcatgtttgcccgaactcggagtccttaaaaagccgcttcttgtcgtcgttccgagacatgttagcagatcgcagtgccacctttcctgacgcgctcggccccatattcggacgcaattgtcatttgtagcacaattggagcaaatctggcgaggcagtaggcttttaagttgcaaggcgagagagcaaagtgggacgcggcgtgattattggtatttacgcgacggcccggcgcgttagcggcccttcccccaggccagggacgattatgtatcaatattgttgcgttcgggcactcgtgcgagggctcctgcgggctggggagggggatctgggaattggaggtacgaccgagatggcttgctcggggggaggtttcctcgccgagcaagccagggttaggtgttgcgctcttgactcgttgtgcattctaggaccccactgctactcacaacaagcc

SEQ ID NO: 188 - DNA, 281 bp, Chlorella vulgaris
  misc_feature 1..281: note = alpha-tubulin promoter(GenBank No. D16504.1)
  source 1..281: mol_type = other DNA
tgatgcaaacaattctattgatcatgctgcatacttcaatgccttgatgcacaaggtctcacaacaagcatgtcctcccgcatgcacatcgtttccccctcacaaaatctgtctctggtttggtggtcagctggcgtgttttgcgggcgttccctctttcagacaccacaccagagcgtcgcgcgcaaaacttacaaaattggaagacgcgtcctcgttcgccgtctgctcctctttcttaaagcctccaagccacccagcttctttctaaatctgcaacc

SEQ ID NO: 189 - DNA, 447 bp, synthetic construct
  misc_feature 1..447: note = 4xRE/B4REA promoter
  source 1..447: mol_type = other DNA
gacttttcaacaaagggtaatatccggaaacctcctcggattccattgcccagctatctgtcactttattgtgaagatagtggaaaaggaaggtggctcctacaaatgccatcattgcgataaaggaaaggccatcgttgaagatgcctctgccgacagtggtcccaaagatggacccccacccacgaggagcatcgtggaaaaagaagacgttccaaccacgtcttcaaagcaagtggattgatgtgatatctcagccgccaaagaggacccagaatcagccgccaaagaggacccagaatcagccgccaaagaggacccagaatcagccgccaaagaggacccagaatccactgacgtaagggatgacgcacaatcccactatccttcgcaagacccttcctctatataaggaagttcatttcatttggagaggacacgctgaaa

SEQ ID NO: 190 - DNA, 782 bp, synthetic construct
  misc_feature 1..782: note = FsFfCBD promoter
  source 1..782: mol_type = other DNA
cactccccctctctaaaaaattttgtttttagaatttgtgttgatgaaaactttgaagctggagggcttcttttatagctggagggcttcttttatagctgcgttttttgaaatcatacgtcagcgcttacgtttttaagcattaaaatctctcgtgaggcaatctgctaaaacgttttttacaccttcaagatgttcgacatcaaattgatacttgctgagaattcagctggcttgtggggaccagacaaaaaaggaatggtgcagaattgttaggcgcacctaccaaaagcatctttgcctttattgcaaagataagcagattcctctagtacaagtggggaacaaaataacgtggaaaagagctgtcctgacagcccactcactaatgcgtatgacgaacgcagtgacgaccacaaaagaattccctctcccgggtgagacttttcaacaaagggtaatatccggaaacctcctcggattccattgcccagctatctgtcactttattgtgaagatagtggaaaaggaaggtggctcctacaaatgccatcattgcgataaaggaaaggccatcgttgaagatgcctctgccgacagtggtcccaaagatggacccccacccacgaggagcatcgtggaaaaagaagacgttccaaccacgtcttcaaagcaagtggattgatgtgatatctccactgacgtaagggatgacgcacaatcccactatccttcgcaagacccttcctctatataaggaagttcatttcatttggagagga

SEQ ID NO: 191 - DNA, 149 bp, synthetic construct
  misc_feature 1..149: note = 4 x GCC promoter
  source 1..149: mol_type = other DNA
ggatccttaccagccgcccatgtgagatccttaccagccgcccatgtgagatccttaccagccgcccatgtgagatccttaccagccgcccatgtgagatctgcaagacccttcctctatataaggaagttcatttcatttggagagga

SEQ ID NO: 192 - DNA, 75 bp, synthetic construct
  misc_feature 1..75: note = 4 x Rose1-7 promoter
  source 1..75: mol_type = other DNA
gccgccagccgccagccgccagccgccagcaagacccttcctctatataaggaagttcatttcatttggagagga

SEQ ID NO: 193 - DNA, 593 bp, synthetic construct
  misc_feature 1..593: note = FSgt-PFlt promoter (Accn. No. NC003554.1)
  source 1..593: mol_type = other DNA
tttacagtaagaactgataacaaaaattttacttatttccttagaattaatcttaaaggtgatagtaaacaaggacgattagtccgttggcaaaattggttcagcaagtatcaatttgatgtcgaacatcttgaaggtgtaaaaaacgttttagcagattgcctcacgagagattttaatgcttaaaaacgtaagcgctgacgtatgattcccaacgagtttttacttcggacagtcaaaaatgagtttaacttctcagccgaggtaaaacaagaaatatgcttacgtctacagagggatttctctgaagatcatgtttgccagctatgcgaacaatcatcgggagatcttgagccaatcaaagaggagtgatgtagacctaaagcaataatggagccatgacgtaagggcttacgccattacgaaataattaaaggctgatgtgacctgtcggtctctcagaacctttactttttatatttggcgtgtatttttaaatttccacggcaatgacgatgtgacctgtgcatccgctttgcctataaataagttttagtttgtattgatcgacacgatcgagaagacacggccat

SEQ ID NO: 194 - DNA, 614 bp, synthetic construct
  misc_feature 1..614: note = MSgt-PFlt promoter (Accn. No. NC004036.1)
  source 1..614: mol_type = other DNA
agcggtaaaacaggtgattactaaatttagtatttatctaacccctgtttgttttacagtcaggacagataatgtaaatcttttaaaaggatttatgaataaaaagattactggtgacagtaaacagggaaggctaataagatggcaaatgtggttttcacattacacctttaaggtggaccacctaaaaggagaacaaaatgtgctggctgattatctcaccagagaattcccaacgagtttttacttcggacagtcaaaaatgagtttaacttctcagccgaggtaaaacaagaaatatgcttacgtctacagagggatttctctgaagatcatgtttgccagctatgcgaacaatcatcgggagatcttgagccaatcaaagaggagtgatgtagacctaaagcaataatggagccatgacgtaagggcttacgccattacgaaataattaaaggctgatgtgacctgtcggtctctcagaacctttactttttatatttggcgtgtatttttaaatttccacggcaatgacgatgtgacctgtgcatccgctttgcctataaataagttttagtttgtattgatcgacacgatcgagaagacacggccat

SEQ ID NO: 195 - DNA, 687 bp, synthetic construct
  misc_feature 1..687: note = PFlt-UAS-2X promoter (Accn. No. NC001634.1)
  source 1..687: mol_type = other DNA
gagtttttacttcggacagtcaaaaatgagtttaacttctcagccgaggtaaaacaagaaatatgcttacgtctacagagggatttctctgaagatcatgtttgccagctatgcgaacaatcatcgggagatcttgagccaatcaaagaggagtgatgtagacctaaagcaataatggagccatgacgtaagggcttacgccattacgaaataattaaaggctgatgtgacctgtcggtctctcagaacctttactttttatatttggcgtgtatttttaaatttccacggcaatgacgatgtgcccaacgagtttttacttcggacagtcaaaaatgagtttaacttctcagccgaggtaaaacaagaaatatgcttacgtctacagagggatttctctgaagatcatgtttgccagctatgcgaacaatcatcgggagatcttgagccaatcaaagaggagtgatgtagacctaaagcaataatggagccatgacgtaagggcttacgccattacgaaataattaaaggctgatgtgacctgtcggtctctcagaacctttactttttatatttggcgtgtatttttaaatttccacggcaatgacgatgtgacctgtgcatccgctttgcctataaataagttttagtttgtattgatcgacacgatcgagaagacacggccat

SEQ ID NO: 196 - DNA, 54 bp, synthetic construct
  misc_feature 1..54: note = 4 x RSRE promoter
  source 1..54: mol_type = other DNA
ccgtcccgcgttccgtcccgcgttccgtcccgcgttccgtcccgcgttccgtcc

SEQ ID NO: 197 - DNA, 551 bp, synthetic construct
  misc_feature 1..551: note = p35S-PCHS-omega promoter
  source 1..551: mol_type = other DNA
cccaagcttcatcgttgaagatgcctctgccgacagtggtcccaaagatggacccccacccacgaggagcatcgtggaaaaagaagacgttccaaccacgtcttcaaagcaagtggattgatgtgatatctccactgacgtaagggatgacgcacaatcccactatccttcgatgcaagaacgtcaaggccattcattttggttcaacagattgatgaaaaatctaagagcctttgatcttgagaagtaggtaaccattaatttgtgttgaaggtttgctacgaaaataaaaaggatgtcacgtgccatcaagttatagctacacgtgattactatctaccattctcctttagggttctcgtataaatactctacaatccccatgcaaaccataacacaatataaaagatacttacacttgtcacgtactacataaaaaaaaaaaaataccaaacttttttcaagcaaaaatggcgtatttttacaacaattaccaacaacaacaaacaacaaacaacattacaattactatttacaattacatctagagc

SEQ ID NO: 198 - DNA, 556 bp, synthetic construct
  misc_feature 1..556: note = p35S-LCHS-omega promoter
  source 1..556: mol_type = other DNA
cccaagcttcatcgttgaagatgcctctgccgacagtggtcccaaagatggacccccacccacgaggagcatcgtggaaaaagaagacgttccaaccacgtcttcaaagcaagtggattgatgtgatatctccactgacgtaagggatgacgcacaatcccactatccttcgcggacacgatagtctggtaaaatgaaacaaaggaaaaaaaacaaaaatgttctgcttgctccaactcaggtgaaccgcttgtttttgttatttcccactcctcgcagtctaaccttcgtggtcagacttaaagtagtgcgtgcccgctagctaccctcaggtggcaactaccaattaactcggcggagacgacgatcacgtgggagctcatctgccactccctcacctataaatgtcagtctccctcaacccctcctcactcatcccttccatccaccacgctcttcctcaccctcccagtccaacccgtatttttacaacaattaccaacaacaacaaacaacaaacaacattacaattactatttacaattacatctagagc

SEQ ID NO: 199 - DNA, 566 bp, synthetic construct
  misc_feature 1..566: note = pOCS-PCHS-omega promoter
  source 1..566: mol_type = other DNA
cccaagcttcggtgcgatgcccccatcgtaggtgaaggtggaaattaatgatccatcttgagaccacaggcccacaacagctaccagtttcctcaagggtccaccaaaaacgtaagcgcttacgtacatggtcgataagaaaaggcaatttgtagatgttaacatccaacgtcgctttcagggatccatgcaagaacgtcaaggccattcattttggttcaacagattgatgaaaaatctaagagcctttgatcttgagaagtaggtaaccattaatttgtgttgaaggtttgctacgaaaataaaaaggatgtcacgtgccatcaagttatagctacacgtgattactatctaccattctcctttagggttctcgtataaatactctacaatccccatgcaaaccataacacaatataaaagatacttacacttgtcacgtactacataaaaaaaaaaaaataccaaacttttttcaagcaaaaatggcgtatttttacaacaattaccaacaacaacaaacaacaaacaacattacaattactatttacaattacatctagagc

SEQ ID NO: 200 - DNA, 571 bp, synthetic construct
  misc_feature 1..571: note = pOCS-LCHS-omega promoter
  source 1..571: mol_type = other DNA
cccaagcttcggtgcgatgcccccatcgtaggtgaaggtggaaattaatgatccatcttgagaccacaggcccacaacagctaccagtttcctcaagggtccaccaaaaacgtaagcgcttacgtacatggtcgataagaaaaggcaatttgtagatgttaacatccaacgtcgctttcagggatcccggacacgatagtctggtaaaatgaaacaaaggaaaaaaaacaaaaatgttctgcttgctccaactcaggtgaaccgcttgtttttgttatttcccactcctcgcagtctaaccttcgtggtcagacttaaagtagtgcgtgcccgctagctaccctcaggtggcaactaccaattaactcggcggagacgacgatcacgtgggagctcatctgccactccctcacctataaatgtcagtctccctcaacccctcctcactcatcccttccatccaccacgctcttcctcaccctcccagtccaacccgtatttttacaacaattaccaacaacaacaaacaacaaacaacattacaattactatttacaattacatctagagc

SEQ ID NO: 201 - DNA, 638 bp, synthetic construct
  misc_feature 1..638: note = CL promoter (GenBank No. DQ494557.1)
  source 1..638: mol_type = other DNA
tccaagcttaatgagaacgaccctcttaagtagtactggaaattgaaaaaaagaaatctagaaatgctaacatgtaagtttttgttaccaaaaatgcaatttgtatgtagccacaatttcatggccgacctgctttttttttcttcttctttctgaaaaccacaaatatgattacacgtggcctgaaaagaacgaacagaaactcggtaatgtgcaaaaaatatcttactcttaatacgtgtaattttggagtgtaataggtctatcacagtgctgaatctagaaaaatctcatacagtgtgagataaatctcaacaaaaacgttgagtccatagagggggtgtatgtgacacccaacctcagcaaaagaaaacctcccctcaagaaggacatttgcggtgctaaacaatttcaagtctcatcacacatatatattatataatactaataaagaatagaaaaaggaaaggtaaacatcactaacgacagttgcggtgcaaagagagtgaggtaataaacatcactaacttttattggttatgtcaaactcaaagtaaaatttctcaacttgtttacgtgcctatatataccatgcttgttatatgctcaaagcaccaacaaaatttcgcggatccgcg

SEQ ID NO: 202 - DNA, 144 bp, synthetic construct
  misc_feature 1..144: note = MAMP-responsive synthetic promoter
  source 1..144: mol_type = other DNA
tgttgagtcgtttacgtcacgtcgagaattttctctgttgagtcgtttacgtcacgtcgagaattttctctgttgagtcgtttacgtcacgtcgagaattttctctgttgagtcgtttacgtcacgtcgagaattttctctata

SEQ ID NO: 203 - DNA, 435 bp, synthetic construct
  misc_feature 1..435: note = P DRE 35S promoter
  source 1..435: mol_type = other DNA
tggccgacatacatggccgacctgtgagacttttcaacaaagggtaatatccggaaacctcctcggattccattgcccagctatctgtcactttattgtgaagatagtggaaaaggaaggtggctcctacaaatgccatcattgcgataaaggaaaggccatcgttgaagatgcctctgccgacagtggtcccaaagatggacccccacccacgaggagcatcgtggaaaaagaagacgttccaaccacgtcttcaaagcaagtggattgatgtgatatctccactgacgtaagggatgacgcacaatcccactatccttcgcaagacccttcctctatataaggaagttcatttcatttggagaggactatttttacaacaattaccaacaacaacaaacaacaaacaacattacaattactatttacaattac

SEQ ID NO: 204 - DNA, 382 bp, synthetic construct
  misc_feature 1..382: note = SynP16 promoter
  source 1..382: mol_type = other DNA
gccgccgccgcccacgtggccacgtggcatattatattacgtgtctacgtggctacgtggcatattatatttctccactgacgtaagggatgacgcacaatcccactatccttcgcaagacccttcctctatataaggaagttcatttcatttggagaggaccagatcttatataagtttttggttcaagaaagtttttggttactgatgaatagatctattaactgttactttaatcgattcaagctaaagttttttggttactgatgaatagatctattatctgttacttttaatcggtcaagctcaagttttttggttactgatgaatagatctatatacgtcacagtgtgctaaacatgcccttgttttatctcgatc

SEQ ID NO: 205 - DNA, 741 bp, synthetic construct; identical to SEQ ID NO: 104
  misc_feature 1..741: note = A-beta SAPi promoter
  source 1..741: mol_type = other DNA

SEQ ID NO: 206 - DNA, 741 bp, synthetic construct; identical to SEQ ID NO: 104
  misc_feature 1..741: note = 4xSBox minimal 35SCamV TMV omega promoter
  source 1..741: mol_type = other DNA

SEQ ID NO: 207 - DNA, 35 bp, synthetic construct
  source 1..35: mol_type = other DNA; note = cytomegalovirus promoter; note = BSAICMVF1
aaaaggtctcaacctgtgatgcggttttggcagta

SEQ ID NO: 208 - DNA, 40 bp, synthetic construct
  source 1..40: mol_type = other DNA; note = cytomegalovirus promoter; note = BSAICMVR1
aaaaggtctcatgttagctctgcttatatagacctcccac

SEQ ID NO: 209 - DNA, 40 bp, synthetic construct
  source 1..40: mol_type = other DNA; note = cytomegalovirus promoter and enhancer; note = BSAICMV+ENHF1
aaaaggtctcaacctcgttacataacttacggtaaatggc

SEQ ID NO: 210 - DNA, 40 bp, synthetic construct; identical to SEQ ID NO: 208
  source 1..40: mol_type = other DNA; note = cytomegalovirus promoter and enhancer; note = BSAICMV+ENHR1

SEQ ID NO: 211 - DNA, 35 bp, synthetic construct
  source 1..35: mol_type = other DNA; note = BSAISV40F1
aaaaggtctcaacctctgaggcggaaagaaccagc

SEQ ID NO: 212 - DNA, 37 bp, synthetic construct
  source 1..37: mol_type = other DNA; note = BSAISV40R1
aaaaggtctcatgtttttgcaaaagcctaggcctcca

SEQ ID NO: 213 - DNA, 42 bp, synthetic construct
  source 1..42: mol_type = other DNA; note = BSAISV40+AMPRF1
aaaaggtctcaacctcgcggaacccctatttgtttatttttc

SEQ ID NO: 214 - DNA, 45 bp, synthetic construct
  source 1..45: mol_type = other DNA; note = BSAISV40+AMPRR1
aaaaggtctcatgtttttgcaaaagcctaggcctccaaaaaagcc

SEQ ID NO: 215 - DNA, 20 bp, synthetic construct
  source 1..20: mol_type = other DNA; note = PGGA-L2151
tttatgcttccggctcgtat

SEQ ID NO: 216 - DNA, 19 bp, synthetic construct
  source 1..19: mol_type = other DNA; note = PGGA-R3394-2327
agggttttcccagtcacga

SEQ ID NO: 217 - DNA, 35 bp, synthetic construct
  source 1..35: mol_type = other DNA; note = BSAIEGFPF1
aaaaggtctcaggctatggtgagcaagggcgagga

SEQ ID NO: 218 - DNA, 36 bp, synthetic construct
  source 1..36: mol_type = other DNA; note = BSAIEGFPR1
aaaaggtctcactgacttgtacagctcgtccatgcc

SEQ ID NO: 219 - DNA, 20 bp, synthetic construct
  source 1..20: mol_type = other DNA; note = KANR3
ggccattttccaccatgata

SEQ ID NO: 220 - DNA, 20 bp, synthetic construct
  source 1..20: mol_type = other DNA; note = PGGA-L2151
tttatgcttccggctcgtat

SEQ ID NO: 221 - DNA, 19 bp, synthetic construct
  source 1..19: mol_type = other DNA; note = PGGA-R3394-2327
agggttttcccagtcacga

SEQ ID NO: 222 - DNA, 20 bp, synthetic construct
  source 1..20: mol_type = other DNA; note = DTR-64
cgatttttgtgatgctcgtc

SEQ ID NO: 223 - DNA, 19 bp, synthetic construct
  source 1..19: mol_type = other DNA; note = DTR-63COR
acctctcgggcttctggat

SEQ ID NO: 224 - DNA, 18 bp, synthetic construct
  source 1..18: mol_type = other DNA; note = FLUCR1
agcacgggcatgaagaac

SEQ ID NO: 225 - DNA, 19 bp, synthetic construct
  source 1..19: mol_type = other DNA; note = FLUCR2
aagcggtacatcagcacca

SEQ ID NO: 226 - DNA, 18 bp, synthetic construct
  source 1..18: mol_type = other DNA; note = FLUCR3
cgtcccagtaggcgatgt

SEQ ID NO: 227 - DNA, 22 bp, synthetic construct
  source 1..22: mol_type = other DNA; note = E001R1
ttgagaatgaacaaaaggacca

SEQ ID NO: 228 - DNA, 24 bp, synthetic construct
  source 1..24: mol_type = other DNA; note = F005R1
tgatatctaacgatcaaacccaga

SEQ ID NO: 229 - DNA, 19 bp, synthetic construct
  source 1..19: mol_type = other DNA; note = F005R3
agcaatcgcgcatatgaaa

SEQ ID NO: 230 - DNA, 21 bp, synthetic construct
  source 1..21: mol_type = other DNA; note = F005R5
ttttaggtttgaccggttctg

SEQ ID NO: 231 - DNA, 19 bp, synthetic construct
  source 1..19: mol_type = other DNA; note = A432F1
acacctaccgatgcgtgaa

SEQ ID NO: 232 - DNA, 22 bp, synthetic construct
  source 1..22: mol_type = other DNA; note = E001R1
ttgagaatgaacaaaaggacca

SEQ ID NO: 233 - DNA, 20 bp, synthetic construct
  source 1..20: mol_type = other DNA; note = KanR1
gcccagtcatagccgaatag

SEQ ID NO: 234 - DNA, 20 bp, synthetic construct
  source 1..20: mol_type = other DNA; note = KanR3
ggccattttccaccatgata

SEQ ID NO: 235 - DNA, 19 bp, synthetic construct
  source 1..19: mol_type = other DNA; note = A432F1
acacctaccgatgcgtgaa

SEQ ID NO: 236 - DNA, 20 bp, synthetic construct
  source 1..20: mol_type = other DNA; note = eGFPR1
ctgggtgctcaggtagtggt

SEQ ID NO: 237 - DNA, 20 bp, synthetic construct
  source 1..20: mol_type = other DNA; note = eGFPR2
tcgtccttgaagaagatggt

SEQ ID NO: 238 - DNA, 7854 bp, synthetic construct
  misc_feature 1..7854: note = pAGS-0001 EF2 promoter
  source 1..7854: mol_type = other DNA
accttccattttgacatgtttcctagctagaaggaacagctattcatatgaattttccgaggtcacgctgtgatggatcgattcgttcccgtcacagacgcaagcagcgaggtgatggctggacgggcacgcgtcacaatttagaacaacccggactcttgtgacgcgagctccgggtgcggaaaaccctacggggtgaaaggagccgcagcttccacccatttacttgactgataacccagtacacacaacgctaccgtgacggaaatgccgcgcgctgtgaagccgtggtgaatctttcgctgctgctcgttctctccacacacacaacagtattcagtcgactggtaccaacaggctatggaggacgccaagaacatcaagaagggccccgcccccttctaccccctggaggacggcaccgccggcgagcagctgcacaaggccatgaagcgctacgccctggtgcccggcaccatcgccttcaccgacgcccacatcgaggtggacatcacctacgccgagtacttcgagatgagcgtgcgcctggccgaggccatgaagcgctacggcctgaacaccaaccaccgcatcgtggtgtgcagcgagaacagcctgcagttcttcatgcccgtgctgggcgccctgttcatcggcgtggccgtggcccccgccaacgacatctacaacgagcgcgagctgctgaacagcatgggcatcagccagcccaccgtggtgttcgtgagcaagaagggcctgcagaagatcctgaacgtgcagaagaagctgcccatcatccagaagatcatcatcatggacagcaagaccgactaccagggcttccagagcatgtacaccttcgtgaccagccacctgccccccggcttcaacgagtacgacttcgtgcccgagagcttcgaccgcgacaagaccatcgccctgatcatgaacagcagcggcagcaccggcctgcccaagggcgtggccctgccccaccgcaccgcctgcgtgcgcttcagccacgcccgcgaccccatcttcggcaaccagatcatccccgacaccgccatcctgagcgtggtgcccttccaccacggcttcggcatgttcaccaccctgggctacctgatctgcggcttccgcgtggtgctgatgtaccgcttcgaggaggagctgttcctgcgcagcctgcaggactacaagatccagagcgccctgctggtgcccaccctgttcagcttcttcgccaagagcaccctgatcgacaagtacgacctgagcaacctgcacgagatcgccagcggcggcgcccccctgagcaaggaggtgggcgaggccgtggccaagcgcttccacctgcccggcatccgccagggctacggcctgaccgagaccaccagcgccatcctgatcacccccgagggcgacgacaagcccggcgccgtgggcaaggtggtgcccttcttcgaggccaaggtggtggacctggacaccggcaagaccctgggcgtgaaccagcgcggcgagctgtgcgtgcgcggccccatgatcatgagcggctacgtgaacaaccccgaggccaccaacgccctgatcgacaaggacggctggctgcacagcggcgacatcgcctactgggacgaggacgagcacttcttcatcgtggaccgcctgaagagcctgatcaagtacaagggctaccaggtggcccccgccgagctggagagcatcctgctgcagcaccccaacatcttcgacgccggcgtggccggcctgcccgacgacgacgccggcgagctgcccgccgccgtggtggtgctggagcacggcaagaccatgaccgagaaggagatcgtggactacgtggccagccaggtgaccaccgccaagaagctgcgcggcggcgtggtgttcgtggacgaggtgcccaagggcctgaccggcaagctggacgcccgcaagatccgcgagatcctgatcaaggccaagaagggcggcaagatcgccgtgtcaggtggatcctagataacctttaccttcattccctgtaaattggtaccctgcaaagctttcgttcgtatcatcggtttcgacaacgttcgtcaagttcaatgcatcagtttcattgcgcacacaccagaatcctactgagtttgagtattatggcattgggaaaactgtttttcttgtaccatttgttgtgcttgtaatttactgtgttttttattcggttttcgctatcgaactgtgaaatggaaatggatggagaagagttaatgaatgatatggtccttttgttcattctcaaattaatattatttgttttttctcttatttgttgtgtgttgaatttgaaattataagagatatgcaaacattttgttttgagtaaaaatgtgtcaaatcgtggcctctaatgaccgaagttaatatgaggagtaaaacacttgtagttgtaccattatgcttattcactaggcaacaaatatattttcagacctagaaaagctgcaaatgttactgaatacaagtatgtcctcttgtgttttagacatttatgaactttcctttatgtaattttccagaatccttgtcagattctaatcattgctttataattatagttatactcatggatttgtagttgagtatgaaaatattttttaatgcattttatgacttgccaattgattgacaacatgcatcaatcgactagtcgacgagtcagtaataaacggcgtcaaagtggttgcagccggcacacacgagtcgtgtttatcaactcaaagcacaaatacttttcctcaacctaaaaataaggcaattagccaaaaacaactttgcgtgtaaacaacgctcaatacacgtgtcattttattattagctattgcttcaccgccttagctttctcgtgacctagtcgtcctcgtcttttcttcttcttcttctataaaacaatacccaaagagctcttcttcttcacaattcagatttcaatttctcaaaatcttaaaaactttctctcaattctctctaccgtgatcaaggtaaatttctgtgttccttattctctcaaaatcttcgattttgttttcgttcgatcccaatttcgtatatgttctttggtttagattctgttaatcttagatcgaagacgattttctgggtttgatcgttagatatcatcttaattctcgattagggtttcatagatatcatccgatttgttcaaataatttgagttttgtcgaataattactcttcgatttgtgatttctatctagatctggtgttagtttctagtttgtgcgatcgaatttgtagattaatctgagtttttctgattaacaccacaccaatctggtaccagaaaaggggagaagcaaaaccatgggtaaaaagcctgaactcaccgcgacgtctgtcgagaagtttctgatcgaaaagttcgacagcgtctccgacctgatgcagctctcggagggcgaagaatctcgtgctttcagcttcgatgtaggagggcgtggatatgtcctgcgggtaaatagctgcgccgatggtttctacaaagatcgttatgtttatcggcactttgcatcggccgcgctcccgattccggaagtgcttgacattggggcattcagcgagagcctgacctattgcatctcccgccgtgcacagggtgtcacgttgcaagacctgcctgaaaccgaactgcccgctgttctgcaaccggtcgcggaggcgatggatgccatcgctgcggccgatcttagccagacgagcgggttcggcccattcggaccgcaaggaatcggtcaatacactacatggcgtgatttcatatgcgcgattgctgatccccatgtgtatcactggcaaactgtgatggacgacaccgtcagtgcgtccgtcgcgcaggctctcgatgagctgatgctttgggccgaggactgccccgaagtccggcacctcgtgcacgcggatttcggctccaacaatgtcctgacggacaatggccgcataacagcggtcattgactggagcgaggcgatgttcggggattcccaatacgaggtcgccaacatcttcttctggaggccgtggttggcttgtatggagcagcagacgcgctacttcgagcggaggcatccggagcttgcaggatcgccgcggctccgggcgtatatgctccgcattggtcttgaccaactctatcagagcttggttgacggcaatttcgatgatgcagcttgggcgcagggtcgatgcgacgcaatcgtccgatccggagccgggactgtcgggcgtacacaaatcgcccgcagaagcgcggccgtctggaccgatggctgtgtagaagtactcgccgatagtggaaaccgacgccccagcactcgtccgagggcaaaggaatagatgcatcctgctttaatgagatatgcgagacgcctatgatcgcatgatatttgctttcaattctgttgtgcacgttgtaaaaaacctgagcatgtgtagctcagatccttaccgccggtttcggttcattctaatgaatatatcacccgttactatcgtatttttatgaataatattctccgttcaatttactgattgtaccctactacttatatgtacaatattaaaatgaaaacaatatattgtgctgaataggtttatagcgacatctatgatagagcgccacaataacaaacaattgcgttttattattacaaatccaattttaaaaaaagcggcagaaccggtcaaacctaaaagactgattacataaatcttattcaaatttcaaaagtgccccaggggctagtatctacgacacaccgagcggcgaactaataacgctcactgaagggaactccggttccccgccggcgcgcatgggtgagattccttgaagttgagtattggccgtccgctctaccgaaagttacgggcaccattcaacccggtccagcacggcggccgggtaaccgacttgctgccccgagaattatgcagcatttttttggtgtatgtgggccccaaatgaagtgcaggtcaaaccttgacagtgacgacaaatcgttgggcgggtccagggcgaattttgcgacaacatgtcgaggctcagcaggaccggcatgcaagctagcttactagtgatattctatagtgtcacctaaatgtattctagaccaagcatgcacagctggcgttctcagccagatccaacgttacaccacaatatatcctgccaagatctaattccggggatcggaaatccagaagcccgagaggttgccgcctttcgggctttttctttttcaaaaaaaaaaatttataaaacgatctgttgcggccggccgccgggttgtgggcaaaggcgctcgacggtgggcaaccgcttgcggttgtccacgggcggagccggtgcgcgtagcgcattgtccacaagccaagggcgaccaataattgatatatatattcataattgaaaagctaattgaacatactacttgctgtaactacttgccggagcgaggggtgtttgcaagctgttgatctgaaagggctattagcgttctcacgtgcctttttgattagcgatttcacgtgaccttattagcgatttcacgtactccgattagcgatttcacgtaccctgattagcgatttcacgtggatagtttttggagcgggccggaaagccccgtgaatcaaggctttgcggggcattagcggtttcacgtggataactaccctctatccacaggcttccggggataaaaaagcccgctcgacggcgggctgttggatggggatcgcctgaatcgccccatcatccagccagaaagtgagggagccacggttgatgagagctttgttgtaggtggaccagttggtgattttgaacttttgctttgccacggaacggtctgcgttgtcgggaagatgcgtgatctgatccttcaactcagcaaaagttcgatttattcaacaaagccacgttgtgtctcaaaatctctgatgttacattgcacaagataaaaatatatcatcatgaacaataaaactgtctgcttacataaacagtaatacaaggggtgttatgagggaagcggtgatcgccgaagtatcgactcaactatcagaggtagttggcgtcatcgagcgccatctcgaaccgacgttgctggccgtacatttgtacggctccgcagtggatggcggcctgaagccacacagtgatattgatttgctggttacggtgaccgtaaggcttgatgaaacaacgcggcgagctttgatcaacgaccttttggaaacttcggcttcccctggagagagcgagattctccgcgctgtagaagtcaccattgttgtgcacgacgacatcattccgtggcgttatccagctaagcgcgaactgcaatttggagaatggcagcgcaatgacattcttgcaggtatcttcgagccagccacgatcgacattgatctggctatcttgctgacaaaagcaagagaacatagcgttgccttggtaggtccagcggcggaggaactctttgatccggttcctgaacaggatctatttgaggcgctaaatgaaaccttaacgctatggaactcgccgcccgactgggctggcgatgagcgaaatgtagtgcttacgttgtcccgcatttggtacagcgcagtaaccggcaaaatcgcgccgaaggatgtcgctgccgactgggcaatggagcgcctgccggcccagtatcagcccgtcatacttgaagctaggcaggcttatcttggacaagaagatcgcttggcctcgcgcgcagatcagttggaagaatttgttcactacgtgaaaggcgagatcaccaaggtagtcggcaaataatcactagaccaatgttacacatatatactttagattgatttaaaacttcatttttaatttaaaaggatctaggtgaagatcctttttgataatctcatgaccaaaatcccttaacgtgagttttcgttccactgagcgtcagaccccgtagaaaagatcaaaggatcttcttgagatcctttttttctgcgcgtaatctgctgcttgcaaacaaaaaaaccaccgctaccagcggtggtttgtttgccggatcaagagctaccaactcttcttccgaaggtaactggcttcagcagagcgcagataccaaatactgttcttctagtgtagccgtagttaggccaccacttcaagaactctgtagcaccgcctacatacctcgctctgctaatcctgttaccagtggctgctgccagtggcgataagtcgtgtcttaccgggttggactcaagacgatagttaccggataaggcgcagcggtcgggctgaacggggggttcgtgcacacagcccagcttggagcgaacgacctacaccgaactgagatacctacagcgtgagctatgagaaagcgccacgcttcccgaagggagaaaggcggacaggtatccggtaagcggcagggtcggaacaggagagcgcacgagggagcttccagggggaaacgcctggtatctttatagtcctgtcgggtttcgccacctctgacttgagcgtcgatttttgtgatgctcgtcaggggggcggagcctatggaaaaacgccagcaacgcggcctttttacggttcctggccttttgctggccttttgctcacatgagatctcaaacaaacacatacagcgacttagtttacccgccaatatatcctgtcaaggctcgaactaggctcggacgaagtaagcggccgcaaccttaattaaacacggcgcgccaacagcgatcgcaccaggtacc

SEQ ID NO: 239 - DNA, 8180 bp, synthetic construct
  misc_feature 1..8180: note = pAGS-0002 Histone 4 promoter
  source 1..8180: mol_type = other DNA
acctgcaatctcacgcaccaggcgctggaagggcaacttgcggatgagaaggtccgtggacttctggtaacgacggatctcacgcagagcgacggttccagggcgataacggtggggcttcttgactcctccggtagccggagcggacttacgggcagccttggtggcaagctgcttgcgcggcgctttgcctccggtggatttacgggcggtttgcttggttcgggccattttgacggttttttttacaagagaagagttcttgaaatttgtgaggttaaagtgtgtggcttccgccgtagtcaaggagcgtgcggttgccgatcgcaccggtacgttctgtagaaatgaacacagtgtgttgaattgaaagtatggcgcaggtatggtgtgtgataagtagcagccgcgccgagacaaacaaactttggtttctacgacaatctctgtagacaagtactagaaacccgtttgaacgagcataaatctgcaccggcaggccaccagacatcgtttcaacgtaatattctacgtaaccattttatcccaggaaacctacggcctgtgaaccactgaaaggaagcactcacaattcgctctcggcaacaaccgacaatagtcttactcacagtcaataccgaaaacaaacaacagaacagtattcagtcgactggtaccaacaggctatggaggacgccaagaacatcaagaagggccccgcccccttctaccccctggaggacggcaccgccggcgagcagctgcacaaggccatgaagcgctacgccctggtgcccggcaccatcgccttcaccgacgcccacatcgaggtggacatcacctacgccgagtacttcgagatgagcgtgcgcctggccgaggccatgaagcgctacggcctgaacaccaaccaccgcatcgtggtgtgcagcgagaacagcctgcagttcttcatgcccgtgctgggcgccctgttcatcggcgtggccgtggcccccgccaacgacatctacaacgagcgcgagctgctgaacagcatgggcatcagccagcccaccgtggtgttcgtgagcaagaagggcctgcagaagatcctgaacgtgcagaagaagctgcccatcatccagaagatcatcatcatggacagcaagaccgactaccagggcttccagagcatgtacaccttcgtgaccagccacctgccccccggcttcaacgagtacgacttcgtgcccgagagcttcgaccgcgacaagaccatcgccctgatcatgaacagcagcggcagcaccggcctgcccaagggcgtggccctgccccaccgcaccgcctgcgtgcgcttcagccacgcccgcgaccccatcttcggcaaccagatcatccccgacaccgccatcctgagcgtggtgcccttccaccacggcttcggcatgttcaccaccctgggctacctgatctgcggcttccgcgtggtgctgatgtaccgcttcgaggaggagctgttcctgcgcagcctgcaggactacaagatccagagcgccctgctggtgcccaccctgttcagcttcttcgccaagagcaccctgatcgacaagtacgacctgagcaacctgcacgagatcgccagcggcggcgcccccctgagcaaggaggtgggcgaggccgtggccaagcgcttccacctgcccggcatccgccagggctacggcctgaccgagaccaccagcgccatcctgatcacccccgagggcgacgacaagcccggcgccgtgggcaaggtggtgcccttcttcgaggccaaggtggtggacctggacaccggcaagaccctgggcgtgaaccagcgcggcgagctgtgcgtgcgcggccccatgatcatgagcggctacgtgaacaaccccgaggccaccaacgccctgatcgacaaggacggctggctgcacagcggcgacatcgcctactgggacgaggacgagcacttcttcatcgtggaccgcctgaagagcctgatcaagtacaagggctaccaggtggcccccgccgagctggagagcatcctgctgcagcaccccaacatcttcgacgccggcgtggccggcctgcccgacgacgacgccggcgagctgcccgccgccgtggtggtgctggagcacggcaagaccatgaccgagaaggagatcgtggactacgtggccagccaggtgaccaccgccaagaagctgcgcggcggcgtggtgttcgtggacgaggtgcccaagggcctgaccggcaagctggacgcccgcaagatccgcgagatcctgatcaaggccaagaagggcggcaagatcgccgtgtcaggtggatcctagataacctttaccttcattccctgtaaattggtaccctgcaaagctttcgttcgtatcatcggtttcgacaacgttcgtcaagttcaatgcatcagtttcattgcgcacacaccagaatcctactgagtttgagtattatggcattgggaaaactgtttttcttgtaccatttgttgtgcttgtaatttactgtgttttttattcggttttcgctatcgaactgtgaaatggaaatggatggagaagagttaatgaatgatatggtccttttgttcattctcaaattaatattatttgttttttctcttatttgttgtgtgttgaatttgaaattataagagatatgcaaacattttgttttgagtaaaaatgtgtcaaatcgtggcctctaatgaccgaagttaatatgaggagtaaaacacttgtagttgtaccattatgcttattcactaggcaacaaatatattttcagacctagaaaagctgcaaatgttactgaatacaagtatgtcctcttgtgttttagacatttatgaactttcctttatgtaattttccagaatccttgtcagattctaatcattgctttataattatagttatactcatggatttgtagttgagtatgaaaatattttttaatgcattttatgacttgccaattgattgacaacatgcatcaatcgactagtcgacgagtcagtaataaacggcgtcaaagtggttgcagccggcacacacgagtcgtgtttatcaactcaaagcacaaatacttttcctcaacctaaaaataaggcaattagccaaaaacaactttgcgtgtaaacaacgctcaatacacgtgtcattttattattagctattgcttcaccgccttagctttctcgtgacctagtcgtcctcgtcttttcttcttcttcttctataaaacaatacccaaagagctcttcttcttcacaattcagatttcaatttctcaaaatcttaaaaactttctctcaattctctctaccgtgatcaaggtaaatttctgtgttccttattctctcaaaatcttcgattttgttttcgttcgatcccaatttcgtatatgttctttggtttagattctgttaatcttagatcgaagacgattttctgggtttgatcgttagatatcatcttaattctcgattagggtttcatagatatcatccgatttgttcaaataatttgagttttgtcgaataattactcttcgatttgtgatttctatctagatctggtgttagtttctagtttgtgcgatcgaatttgtagattaatctgagtttttctgattaacaccacaccaatctggtaccagaaaaggggagaagcaaaaccatgggtaaaaagcctgaactcaccgcgacgtctgtcgagaagtttctgatcgaaaagttcgacagcgtctccgacctgatgcagctctcggagggcgaagaatctcgtgctttcagcttcgatgtaggagggcgtggatatgtcctgcgggtaaatagctgcgccgatggtttctacaaagatcgttatgtttatcggcactttgcatcggccgcgctcccgattccggaagtgcttgacattggggcattcagcgagagcctgacctattgcatctcccgccgtgcacagggtgtcacgttgcaagacctgcctgaaaccgaactgcccgctgttctgcaaccggtcgcggaggcgatggatgccatcgctgcggccgatcttagccagacgagcgggttcggcccattcggaccgcaaggaatcggtcaatacactacatggcgtgatttcatatgcgcgattgctgatccccatgtgtatcactggcaaactgtgatggacgacaccgtcagtgcgtccgtcgcgcaggctctcgatgagctgatgctttgggccgaggactgccccgaagtccggcacctcgtgcacgcggatttcggctccaacaatgtcctgacggacaatggccgcataacagcggtcattgactggagcgaggcgatgttcggggattcccaatacgaggtcgccaacatcttcttctggaggccgtggttggcttgtatggagcagcagacgcgctacttcgagcggaggcatccggagcttgcaggatcgccgcggctccgggcgtatatgctccgcattggtcttgaccaactctatcagagcttggttgacggcaatttcgatgatgcagcttgggcgcagggtcgatgcgacgcaatcgtccgatccggagccgggactgtcgggcgtacacaaatcgcccgcagaagcgcggccgtctggaccgatggctgtgtagaagtactcgccgatagtggaaaccgacgccccagcactcgtccgagggcaaaggaatagatgcatcctgctttaatgagatatgcgagacgcctatgatcgcatgatatttgctttcaattctgttgtgcacgttgtaaaaaacctgagcatgtgtagctcagatccttaccgccggtttcggttcattctaatgaatatatcacccgttactatcgtatttttatgaataatattctccgttcaatttactgattgtaccctactacttatatgtacaatattaaaatgaaaacaatatattgtgctgaataggtttatagcgacatctatgatagagcgccacaataacaaacaattgcgttttattattacaaatccaattttaaaaaaagcggcagaaccggtcaaacctaaaagactgattacataaatcttattcaaatttcaaaagtgccccaggggctagtatctacgacacaccgagcggcgaactaataacgctcactgaagggaactccggttccccgccggcgcgcatgggtgagattccttgaagttgagtattggccgtccgctctaccgaaagttacgggcaccattcaacccggtccagcacggcggccgggtaaccgacttgctgccccgagaattatgcagcatttttttggtgtatgtgggccccaaatgaagtgcaggtcaaaccttgacagtgacgacaaatcgttgggcgggtccagggcgaattttgcgacaacatgtcgaggctcagcaggaccggcatgcaagctagcttactagtgatattctatagtgtcacctaaatgtattctagaccaagcatgcacagctggcgttctcagccagatccaacgttacaccacaatatatcctgccaagatctaattccggggatcggaaatccagaagcccgagaggttgccgcctttcgggctttttctttttcaaaaaaaaaaatttataaaacgatctgttgcggccggccgccgggttgtgggcaaaggcgctcgacggtgggcaaccgcttgcggttgtccacgggcggagccggtgcgcgtagcgcattgtccacaagccaagggcgaccaataattgatatatatattcataattgaaaagctaattgaacatactacttgctgtaactacttgccggagcgaggggtgtttgcaagctgttgatctgaaagggctattagcgttctcacgtgcctttttgattagcgatttcacgtgaccttattagcgatttcacgtactccgattagcgatttcacgtaccctgattagcgatttcacgtggatagtttttggagcgggccggaaagccccgtgaatcaaggctttgcggggcattagcggtttcacgtggataactaccctctatccacaggcttccggggataaaaaagcccgctcgacggcgggctgttggatggggatcgcctgaatcgccccatcatccagccagaaagtgagggagccacggttgatgagagctttgttgtaggtggaccagttggtgattttgaacttttgctttgccacggaacggtctgcgttgtcgggaagatgcgtgatctgatccttcaactcagcaaaagttcgatttattcaacaaagccacgttgtgtctcaaaatctctgatgttacattgcacaagataaaaatatatcatcatgaacaataaaactgtctgcttacataaacagtaatacaaggggtgttatgagggaagcggtgatcgccgaagtatcgactcaactatcagaggtagttggcgtcatcgagcgccatctcgaaccgacgttgctggccgtacatttgtacggctccgcagtggatggcggcctgaagccacacagtgatattgatttgctggttacggtgaccgtaaggcttgatgaaacaacgcggcgagctttgatcaacgaccttttggaaacttcggcttcccctggagagagcgagattctccgcgctgtagaagtcaccattgttgtgcacgacgacatcattccgtggcgttatccagctaagcgcgaactgcaatttggagaatggcagcgcaatgacattcttgcaggtatcttcgagccagccacgatcgacattgatctggctatcttgctgacaaaagcaagagaacatagcgttgccttggtaggtccagcggcggaggaactctttgatccggttcctgaacaggatctatttgaggcgctaaatgaaaccttaacgctatggaactcgccgcccgactgggctggcgatgagcgaaatgtagtgcttacgttgtcccgcatttggtacagcgcagtaaccggcaaaatcgcgccgaaggatgtcgctgccgactgggcaatggagcgcctgccggcccagtatcagcccgtcatacttgaagctaggcaggcttatcttggacaagaagatcgcttggcctcgcgcgcagatcagttggaagaatttgttcactacgtgaaaggcgagatcaccaaggtagtcggcaaataatcactagaccaatgttacacatatatactttagattgatttaaaacttcatttttaatttaaaaggatctaggtgaagatcctttttgataatctcatgaccaaaatcccttaacgtgagttttcgttccactgagcgtcagaccccgtagaaaagatcaaaggatcttcttgagatcctttttttctgcgcgtaatctgctgcttgcaaacaaaaaaaccaccgctaccagcggtggtttgtttgccggatcaagagctaccaactcttcttccgaaggtaactggcttcagcagagcgcagataccaaatactgttcttctagtgtagccgtagttaggccaccacttcaagaactctgtagcaccgcctacatacctcgctctgctaatcctgttaccagtggctgctgccagtggcgataagtcgtgtcttaccgggttggactcaagacgatagttaccggataaggcgcagcggtcgggctgaacggggggttcgtgcacacagcccagcttggagcgaacgacctacaccgaactgagatacctacagcgtgagctatgagaaagcgccacgcttcccgaagggagaaaggcggacaggtatccggtaagcggcagggtcggaacaggagagcgcacgagggagcttccagggggaaacgcctggtatctttatagtcctgtcgggtttcgccacctctgacttgagcgtcgatttttgtgatgctcgtcaggggggcggagcctatggaaaaacgccagcaacgcggcctttttacggttcctggccttttgctggccttttgctcacatgagatctcaaacaaacacatacagcgacttagtttacccgccaatatatcctgtcaaggctcgaactaggctcggacgaagtaagcggccgcaaccttaattaaacacggcgcgccaacagcgatcgcaccaggtacc

SEQ ID NO: 240 - DNA, 7670 bp, synthetic construct
  misc_feature 1..7670: note = pAGS-0003 Lhcf.1 promoter
  source 1..7670: mol_type = other DNA
acctgctgcaggacgcaatggaggattatcaccgcaaaaatgaacttcgaaaaaaactttcgagcgaccatggaaaaggaggatcagattcagattacaacagtggattgctctggtagcaaatatcttctgctagattggctcaacagtattcagtcgactggtaccaacaggctatggaggacgccaagaacatcaagaagggccccgcccccttctaccccctggaggacggcaccgccggcgagcagctgcacaaggccatgaagcgctacgccctggtgcccggcaccatcgccttcaccgacgcccacatcgaggtggacatcacctacgccgagtacttcgagatgagcgtgcgcctggccgaggccatgaagcgctacggcctgaacaccaaccaccgcatcgtggtgtgcagcgagaacagcctgcagttcttcatgcccgtgctgggcgccctgttcatcggcgtggccgtggcccccgccaacgacatctacaacgagcgcgagctgctgaacagcatgggcatcagccagcccaccgtggtgttcgtgagcaagaagggcctgcagaagatcctgaacgtgcagaagaagctgcccatcatccagaagatcatcatcatggacagcaagaccgactaccagggcttccagagcatgtacaccttcgtgaccagccacctgccccccggcttcaacgagtacgacttcgtgcccgagagcttcgaccgcgacaagaccatcgccctgatcatgaacagcagcggcagcaccggcctgcccaagggcgtggccctgccccaccgcaccgcctgcgtgcgcttcagccacgcccgcgaccccatcttcggcaaccagatcatccccgacaccgccatcctgagcgtggtgcccttccaccacggcttcggcatgttcaccaccctgggctacctgatctgcggcttccgcgtggtgctgatgtaccgcttcgaggaggagctgttcctgcgcagcctgcaggactacaagatccagagcgccctgctggtgcccaccctgttcagcttcttcgccaagagcaccctgatcgacaagtacgacctgagcaacctgcacgagatcgccagcggcggcgcccccctgagcaaggaggtgggcgaggccgtggccaagcgcttccacctgcccggcatccgccagggctacggcctgaccgagaccaccagcgccatcctgatcacccccgagggcgacgacaagcccggcgccgtgggcaaggtggtgcccttcttcgaggccaaggtggtggacctggacaccggcaagaccctgggcgtgaaccagcgcggcgagctgtgcgtgcgcggccccatgatcatgagcggctacgtgaacaaccccgaggccaccaacgccctgatcgacaaggacggctggctgcacagcggcgacatcgcctactgggacgaggacgagcacttcttcatcgtggaccgcctgaagagcctgatcaagtacaagggctaccaggtggcccccgccgagctggagagcatcctgctgcagcaccccaacatcttcgacgccggcgtggccggcctgcccgacgacgacgccggcgagctgcccgccgccgtggtggtgctggagcacggcaagaccatgaccgagaaggagatcgtggactacgtggccagccaggtgaccaccgccaagaagctgcgcggcggcgtggtgttcgtggacgaggtgcccaagggcctgaccggcaagctggacgcccgcaagatccgcgagatcctgatcaaggccaagaagggcggcaagatcgccgtgtcaggtggatcctagataacctttaccttcattccctgtaaattggtaccctgcaaagctttcgttcgtatcatcggtttcgacaacgttcgtcaagttcaatgcatcagtttcattgcgcacacaccagaatcctactgagtttgagtattatggcattgggaaaactgtttttcttgtaccatttgttgtgcttgtaatttactgtgttttttattcggttttcgctatcgaactgtgaaatggaaatggatggagaagagttaatgaatgatatggtccttttgttcattctcaaattaatattatttgttttttctcttatttgttgtgtgttgaatttgaaattataagagatatgcaaacattttgttttgagtaaaaatgtgtcaaatcgtggcctctaatgaccgaagttaatatgaggagtaaaacacttgtagttgtaccattatgcttattcactaggcaacaaatatattttcagacctagaaaagctgcaaatgttactgaatacaagtatgtcctcttgtgttttagacatttatgaactttcctttatgtaattttccagaatccttgtcagattctaatcattgctttataattatagttatactcatggatttgtagttgagtatgaaaatattttttaatgcattttatgacttgccaattgattgacaacatgcatcaatcgactagtcgacgagtcagtaataaacggcgtcaaagtggttgcagccggcacacacgagtcgtgtttatcaactcaaagcacaaatacttttcctcaacctaaaaataaggcaattagccaaaaacaactttgcgtgtaaacaacgctcaatacacgtgtcattttattattagctattgcttcaccgccttagctttctcgtgacctagtcgtcctcgtcttttcttcttcttcttctataaaacaatacccaaagagctcttcttcttcacaattcagatttcaatttctcaaaatcttaaaaactttctctcaattctctctaccgtgatcaaggtaaatttctgtgttccttattctctcaaaatcttcgattttgttttcgttcgatcccaatttcgtatatgttctttggtttagattctgttaatcttagatcgaagacgattttctgggtttgatcgttagatatcatcttaattctcgattagggtttcatagatatcatccgatttgttcaaataatttgagttttgtcgaataattactcttcgatttgtgatttctatctagatctggtgttagtttctagtttgtgcgatcgaatttgtagattaatctgagtttttctgattaacaccacaccaatctggtaccagaaaaggggagaagcaaaaccatgggtaaaaagcctgaactcaccgcgacgtctgtcgagaagtttctgatcgaaaagttcgacagcgtctccgacctgatgcagctctcggagggcgaagaatctcgtgctttcagcttcgatgtaggagggcgtggatatgtcctgcgggtaaatagctgcgccgatggtttctacaaagatcgttatgtttatcggcactttgcatcggccgcgctcccgattccggaagtgcttgacattggggcattcagcgagagcctgacctattgcatctcccgccgtgcacagggtgtcacgttgcaagacctgcctgaaaccgaactgcccgctgttctgcaaccggtcgcggaggcgatggatgccatcgctgcggccgatcttagccagacgagcgggttcggcccattcggaccgcaaggaatcggtcaatacactacatggcgtgatttcatatgcgcgattgctgatccccatgtgtatcactggcaaactgtgatggacgacaccgtcagtgcgtccgtcgcgcaggctctcgatgagctgatgctttgggccgaggactgccccgaagtccggcacctcgtgcacgcggatttcggctccaacaatgtcctgacggacaatggccgcataacagcggtcattgactggagcgaggcgatgttcggggattcccaatacgaggtcgccaacatcttcttctggaggccgtggttggcttgtatggagcagcagacgcgctacttcgagcggaggcatccggagcttgcaggatcgccgcggctccgggcgtatatgctccgcattggtcttgaccaactctatcagagcttggttgacggcaatttcgatgatgcagcttgggcgcagggtcgatgcgacgcaatcgtccgatccggagccgggactgtcgggcgtacacaaatcgcccgcagaagcgcggccgtctggaccgatggctgtgtagaagtactcgccgatagtggaaaccgacgccccagcactcgtccgagggcaaaggaatagatgcatcctgctttaatgagatatgcgagacgcctatgatcgcatgatatttgctttcaattctgttgtgcacgttgtaaaaaacctgagcatgtgtagctcagatccttaccgccggtttcggttcattctaatgaatatatcacccgttactatcgtatttttatgaataatattctccgttcaatttactgattgtaccctactacttatatgtacaatattaaaatgaaaacaatatattgtgctgaataggtttatagcgacatctatgatagagcgccacaataacaaacaattgcgttttattattacaaatccaattttaaaaaaagcggcagaaccggtcaaacctaaaagactgattacataaatcttattcaaatttcaaaagtgccccaggggctagtatctacgacacaccgagcggcgaactaataacgctcactgaagggaactccggttccccgccggcgcgcatgggtgagattccttgaagttgagtattggccgtccgctctaccgaaagttacgggcaccattcaacccggtccagcacggcggccgggtaaccgacttgctgccccgagaattatgcagcatttttttggtgtatgtgggccccaaatgaagtgcaggtcaaaccttgacagtgacgacaaatcgttgggcgggtccagggcgaattttgcgacaacatgtcgaggctcagcaggaccggcatgcaagctagcttactagtgatattctatagtgtcacctaaatgtattctagaccaagcatgcacagctggcgttctcagccagatccaacgttacaccacaatatatcctgccaagatctaattccggggatcggaaatccagaagcccgagaggttgccgcctttcgggctttttctttttcaaaaaaaaaaatttataaaacgatctgttgcggccggccgccgggttgtgggcaaaggcgctcgacggtgggcaaccgcttgcggttgtccacgggcggagccggtgcgcgtagcgcattgtccacaagccaagggcgaccaataattgatatatatattcataattgaaaagctaattgaacatactacttgctgtaactacttgccggagcgaggggtgtttgcaagctgttgatctgaaagggctattagcgttctcacgtgcctttttgattagcgatttcacgtgaccttattagcgatttcacgtactccgattagcgatttcacgtaccctgattagcgatttcacgtggatagtttttggagcgggccggaaagccccgtgaatcaaggctttgcggggcattagcggtttcacgtggataactaccctctatccacaggcttccggggataaaaaagcccgctcgacggcgggctgttggatggggatcgcctgaatcgccccatcatccagccagaaagtgagggagccacggttgatgagagctttgttgtaggtggaccagttggtgattttgaacttttgctttgccacggaacggtctgcgttgtcgggaagatgcgtgatctgatccttcaactcagcaaaagttcgatttattcaacaaagccacgttgtgtctcaaaatctctgatgttacattgcacaagataaaaatatatcatcatgaacaataaaactgtctgcttacataaacagtaatacaaggggtgttatgagggaagcggtgatcgccgaagtatcgactcaactatcagaggtagttggcgtcatcgagcgccatctcgaaccgacgttgctggccgtacatttgtacggctccgcagtggatggcggcctgaagccacacagtgatattgatttgctggttacggtgaccgtaaggcttgatgaaacaacgcggcgagctttgatcaacgaccttttggaaacttcggcttcccctggagagagcgagattctccgcgctgtagaagtcaccattgttgtgcacgacgacatcattccgtggcgttatccagctaagcgcgaactgcaatttggagaatggcagcgcaatgacattcttgcaggtatcttcgagccagccacgatcgacattgatctggctatcttgctgacaaaagcaagagaacatagcgttgccttggtaggtccagcggcggaggaactctttgatccggttcctgaacaggatctatttgaggcgctaaatgaaaccttaacgctatggaactcgccgcccgactgggctggcgatgagcgaaatgtagtgcttacgttgtcccgcatttggtacagcgcagtaaccggcaaaatcgcgccgaaggatgtcgctgccgactgggcaatggagcgcctgccggcccagtatcagcccgtcatacttgaagctaggcaggcttatcttggacaagaagatcgcttggcctcgcgcgcagatcagttggaagaatttgttcactacgtgaaaggcgagatcaccaaggtagtcggcaaataatcactagaccaatgttacacatatatactttagattgatttaaaacttcatttttaatttaaaaggatctaggtgaagatcctttttgataatctcatgaccaaaatcccttaacgtgagttttcgttccactgagcgtcagaccccgtagaaaagatcaaaggatcttcttgagatcctttttttctgcgcgtaatctgctgcttgcaaacaaaaaaaccaccgctaccagcggtggtttgtttgccggatcaagagctaccaactcttcttccgaaggtaactggcttcagcagagcgcagataccaaatactgttcttctagtgtagccgtagttaggccaccacttcaagaactctgtagcaccgcctacatacctcgctctgctaatcctgttaccagtggctgctgccagtggcgataagtcgtgtcttaccgggttggactcaagacgatagttaccggataaggcgcagcggtcgggctgaacggggggttcgtgcacacagcccagcttggagcgaacgacctacaccgaactgagatacctacagcgtgagctatgagaaagcgccacgcttcccgaagggagaaaggcggacaggtatccggtaagcggcagggtcggaacaggagagcgcacgagggagcttccagggggaaacgcctggtatctttatagtcctgtcgggtttcgccacctctgacttgagcgtcgatttttgtgatgctcgtcaggggggcggagcctatggaaaaacgccagcaacgcggcctttttacggttcctggccttttgctggccttttgctcacatgagatctcaaacaaacacatacagcgacttagtttacccgccaatatatcctgtcaaggctcgaactaggctcggacgaagtaagcggccgcaaccttaattaaacacggcgcgccaacagcgatcgcaccaggtacc

SEQ ID NO: 241 - DNA, 7793 bp, synthetic construct
  misc_feature 1..7793: note = pAGS-0004 Ubi.U4 promoter
  source 1..7793: mol_type = other DNA
acctactacgttagagcgctaacgagaatacttcatataccgtattttttacgataataataatgtaatgtgaaattgctatccaaaaggcacctaattttgtccaccgttcaaaggaaaggacaaggaagtagtagcgtgtaggtttggtgctgtacaaaataagcaagacacgtgttgccttattataggataatccataaggcaatttcgtcttaagtcggccattgcacctttaaaaggagcctctttgttcccaaaatcttcaacagtattcagtcgactggtaccaacaggctatggaggacgccaagaacatcaagaagggccccgcccccttctaccccctggaggacggcaccgccggcgagcagctgcacaaggccatgaagcgctacgccctggtgcccggcaccatcgccttcaccgacgcccacatcgaggtggacatcacctacgccgagtacttcgagatgagcgtgcgcctggccgaggccatgaagcgctacggcctgaacaccaaccaccgcatcgtggtgtgcagcgagaacagcctgcagttcttcatgcccgtgctgggcgccctgttcatcggcgtggccgtggcccccgccaacgacatctacaacgagcgcgagctgctgaacagcatgggcatcagccagcccaccgtggtgttcgtgagcaagaagggcctgcagaagatcctgaacgtgcagaagaagctgcccatcatccagaagatcatcatcatggacagcaagaccgactaccagggcttccagagcatgtacaccttcgtgaccagccacctgccccccggcttcaacgagtacgacttcgtgcccgagagcttcgaccgcgacaagaccatcgccctgatcatgaacagcagcggcagcaccggcctgcccaagggcgtggccctgccccaccgcaccgcctgcgtgcgcttcagccacgcccgcgaccccatcttcggcaaccagatcatccccgacaccgccatcctgagcgtggtgcccttccaccacggcttcggcatgttcaccaccctgggctacctgatctgcggcttccgcgtggtgctgatgtaccgcttcgaggaggagctgttcctgcgcagcctgcaggactacaagatccagagcgccctgctggtgcccaccctgttcagcttcttcgccaagagcaccctgatcgacaagtacgacctgagcaacctgcacgagatcgccagcggcggcgcccccctgagcaaggaggtgggcgaggccgtggccaagcgcttccacctgcccggcatccgccagggctacggcctgaccgagaccaccagcgccatcctgatcacccccgagggcgacgacaagcccggcgccgtgggcaaggtggtgcccttcttcgaggccaaggtggtggacctggacaccggcaagaccctgggcgtgaaccagcgcggcgagctgtgcgtgcgcggccccatgatcatgagcggctacgtgaacaaccccgaggccaccaacgccctgatcgacaaggacggctggctgcacagcggcgacatcgcctactgggacgaggacgagcacttcttcatcgtggaccgcctgaagagcctgatcaagtacaagggctaccaggtggcccccgccgagctggagagcatcctgctgcagcaccccaacatcttcgacgccggcgtggccggcctgcccgacgacgacgccggcgagctgcccgccgccgtggtggtgctggagcacggcaagaccatgaccgagaaggagatcgtggactacgtggccagccaggtgaccaccgccaagaagctgcgcggcggcgtggtgttcgtggacgaggtgcccaagggcctgaccggcaagctggacgcccgcaagatccgcgagatcctgatcaaggccaagaagggcggcaagatcgccgtgtcaggtggatcctagataacctttaccttcattccctgtaaattggtaccctgcaaagctttcgttcgtatcatcggtttcgacaacgttcgtcaagttcaatgcatcagtttcattgcgcacacaccagaatcctactgagtttgagtattatggcattgggaaaactgtttttcttgtaccatttgttgtgcttgtaatttactgtgttttttattcggttttcgctatcgaactgtgaaatggaaatggatggagaagagttaatgaatgatatggtccttttgttcattctcaaattaatattatttgttttttctcttatttgttgtgtgttgaatttgaaattataagagatatgcaaacattttgttttgagtaaaaatgtgtcaaatcgtggcctctaatgaccgaagttaatatgaggagtaaaacacttgtagttgtaccattatgcttattcactaggcaacaaatatattttcagacctagaaaagctgcaaatgttactgaatacaagtatgtcctcttgtgttttagacatttatgaactttcctttatgtaattttccagaatccttgtcagattctaatcattgctttataattatagttatactcatggatttgtagttgagtatgaaaatattttttaatgcattttatgacttgccaattgattgacaacatgcatcaatcgactagtcgacgagtcagtaataaacggcgtcaaagtggttgcagccggcacacacgagtcgtgtttatcaactcaaagcacaaatacttttcctcaacctaaaaataaggcaattagccaaaaacaactttgcgtgtaaacaacgctcaatacacgtgtcattttattattagctattgcttcaccgccttagctttctcgtgacctagtcgtcctcgtcttttcttcttcttcttctataaaacaatacccaaagagctcttcttcttcacaattcagatttcaatttctcaaaatcttaaaaactttctctcaattctctctaccgtgatcaaggtaaatttctgtgttccttattctctcaaaatcttcgattttgttttcgttcgatcccaatttcgtatatgttctttggtttagattctgttaatcttagatcgaagacgattttctgggtttgatcgttagatatcatcttaattctcgattagggtttcatagatatcatccgatttgttcaaataatttgagttttgtcgaataattactcttcgatttgtgatttctatctagatctggtgttagtttctagtttgtgcgatcgaatttgtagattaatctgagtttttctgattaacaccacaccaatctggtaccagaaaaggggagaagcaaaaccatgggtaaaaagcctgaactcaccgcgacgtctgtcgagaagtttctgatcgaaaagttcgacagcgtctccgacctgatgcagctctcggagggcgaagaatctcgtgctttcagcttcgatgtaggagggcgtggatatgtcctgcgggtaaatagctgcgccgatggtttctacaaagatcgttatgtttatcggcactttgcatcggccgcgctcccgattccggaagtgcttgacattggggcattcagcgagagcctgacctattgcatctcccgccgtgcacagggtgtcacgttgcaagacctgcctgaaaccgaactgcccgctgttctgcaaccggtcgcggaggcgatggatgccatcgctgcggccgatcttagccagacgagcgggttcggcccattcggaccgcaaggaatcggtcaatacactacatggcgtgatttcatatgcgcgattgctgatccccatgtgtatcactggcaaactgtgatggacgacaccgtcagtgcgtccgtcgcgcaggctctcgatgagctgatgctttgggccgaggactgccccgaagtccggcacctcgtgcacgcggatttcggctccaacaatgtcctgacggacaatggccgcataacagcggtcattgactggagcgaggcgatgttcggggattcccaatacgaggtcgccaacatcttcttctggaggccgtggttggcttgtatggagcagcagacgcgctacttcgagcggaggcatccggagcttgcaggatcgccgcggctccgggcgtatatgctccgcattggtcttgaccaactctatcagagcttggttgacggcaatttcgatgatgcagcttgggcgcagggtcgatgcgacgcaatcgtccgatccggagccgggactgtcgggcgtacacaaatcgcccgcagaagcgcggccgtctggaccgatggctgtgtagaagtactcgccgatagtggaaaccgacgccccagcactcgtccgagggcaaaggaatagatgcatcctgctttaatgagatatgcgagacgcctatgatcgcatgatatttgctttcaattctgttgtgcacgttgtaaaaaacctgagcatgtgtagctcagatccttaccgccggtttcggttcattctaatgaatatatcacccgttactatcgtatttttatgaataatattctccgttcaatttactgattgtaccctactacttatatgtacaatattaaaatgaaaacaatatattgtgctgaataggtttatagcgacatctatgatagagcgccacaataacaaacaattgcgttttattattacaaatccaattttaaaaaaagcggcagaaccggtcaaacctaaaagactgattacataaatcttattcaaatttcaaaagtgccccaggggctagtatctacgacacaccgagcggcgaactaataacgctcactgaagggaactccggttccccgccggcgcgcatgggtgagattccttgaagttgagtattggccgtccgctctaccgaaagttacgggcaccattcaacccggtccagcacggcggccgggtaaccgacttgctgccccgagaattatgcagcatttttttggtgtatgtgggccccaaatgaagtgcaggtcaaaccttgacagtgacgacaaatcgttgggcgggtccagggcgaattttgcgacaacatgtcgaggctcagcaggaccggcatgcaagctagcttactagtgatattctatagtgtcacctaaatgtattctagaccaagcatgcacagctggcgttctcagccagatccaacgttacaccacaatatatcctgccaagatctaattccggggatcggaaatccagaagcccgagaggttgccgcctttcgggctttttctttttcaaaaaaaaaaatttataaaacgatctgttgcggccggccgccgggttgtgggcaaaggcgctcgacggtgggcaaccgcttgcggttgtccacgggcggagccggtgcgcgtagcgcattgtccacaagccaagggcgaccaataattgatatatatattcataattgaaaagctaattgaacatactacttgctgtaactacttgccggagcgaggggtgtttgcaagctgttgatctgaaagggctattagcgttctcacgtgcctttttgattagcgatttcacgtgaccttattagcgatttcacgtactccgattagcgatttcacgtaccctgattagcgatttcacgtggatagtttttggagcgggccggaaagccccgtgaatcaaggctttgcggggcattagcggtttcacgtggataactaccctctatccacaggcttccggggataaaaaagcccgctcgacggcgggctgttggatggggatcgcctgaatcgccccatcatccagccagaaagtgagggagccacggttgatgagagctttgttgtaggtggaccagttggtgattttgaacttttgctttgccacggaacggtctgcgttgtcgggaagatgcgtgatctgatccttcaactcagcaaaagttcgatttattcaacaaagccacgttgtgtctcaaaatctctgatgttacattgcacaagataaaaatatatcatcatgaacaataaaactgtctgcttacataaacagtaatacaaggggtgttatgagggaagcggtgatcgccgaagtatcgactcaactatcagaggtagttggcgtcatcgagcgccatctcgaaccgacgttgctggccgtacatttgtacggctccgcagtggatggcggcctgaagccacacagtgatattgatttgctggttacggtgaccgtaaggcttgatgaaacaacgcggcgagctttgatcaacgaccttttggaaacttcggcttcccctggagagagcgagattctccgcgctgtagaagtcaccattgttgtgcacgacgacatcattccgtggcgttatccagctaagcgcgaactgcaatttggagaatggcagcgcaatgacattcttgcaggtatcttcgagccagccacgatcgacattgatctggctatcttgctgacaaaagcaagagaacatagcgttgccttggtaggtccagcggcggaggaactctttgatccggttcctgaacaggatctatttgaggcgctaaatgaaaccttaacgctatggaactcgccgcccgactgggctggcgatgagcgaaatgtagtgcttacgttgtcccgcatttggtacagcgcagtaaccggcaaaatcgcgccgaaggatgtcgctgccgactgggcaatggagcgcctgccggcccagtatcagcccgtcatacttgaagctaggcaggcttatcttggacaagaagatcgcttggcctcgcgcgcagatcagttggaagaatttgttcactacgtgaaaggcgagatcaccaaggtagtcggcaaataatcactagaccaatgttacacatatatactttagattgatttaaaacttcatttttaatttaaaaggatctaggtgaagatcctttttgataatctcatgaccaaaatcccttaacgtgagttttcgttccactgagcgtcagaccccgtagaaaagatcaaaggatcttcttgagatcctttttttctgcgcgtaatctgctgcttgcaaacaaaaaaaccaccgctaccagcggtggtttgtttgccggatcaagagctaccaactcttcttccgaaggtaactggcttcagcagagcgcagataccaaatactgttcttctagtgtagccgtagttaggccaccacttcaagaactctgtagcaccgcctacatacctcgctctgctaatcctgttaccagtggctgctgccagtggcgataagtcgtgtcttaccgggttggactcaagacgatagttaccggataaggcgcagcggtcgggctgaacggggggttcgtgcacacagcccagcttggagcgaacgacctacaccgaactgagatacctacagcgtgagctatgagaaagcgccacgcttcccgaagggagaaaggcggacaggtatccggtaagcggcagggtcggaacaggagagcgcacgagggagcttccagggggaaacgcctggtatctttatagtcctgtcgggtttcgccacctctgacttgagcgtcgatttttgtgatgctcgtcaggggggcggagcctatggaaaaacgccagcaacgcggcctttttacggttcctggccttttgctggccttttgctcacatgagatctcaaacaaacacatacagcgacttagtttacccgccaatatatcctgtcaaggctcgaactaggctcggacgaagtaagcggccgcaaccttaattaaacacggcgcgccaacagcgatcgcaccaggtacc

SEQ ID NO: 242 - DNA, 7928 bp, synthetic construct
  misc_feature 1..7928: note = pAGS-0005 CAM 35s promoter
  source 1..7928: mol_type = other DNA
acctcctactccaaaaatgtcaaagatacagtctcagaagaccaaagggctattgagacttttcaacaaagggtaatatcgggaaacctcctcggattccattgcccagctatctgtcacttcatcaaaaggacagtagaaaaggaaggtggcacctacaaatgccatcattgcgataaaggaaaggctatcgttcaagatgcccctgccgacagtggtcccaaagatggacccccacccacgaggagcatcgtggaaaaagaagacgttccaaccacgtcttcaaagcaagtggattgatgtgatatctccactgacgtaagggatgacgcacaatcccactatccttcgcaagacccttcctctatataaggaagttcatttcatttggagaggacagccaacagtattcagtcgactggtaccaacaggctatggaggacgccaagaacatcaagaagggccccgcccccttctaccccctggaggacggcaccgccggcgagcagctgcacaaggccatgaagcgctacgccctggtgcccggcaccatcgccttcaccgacgcccacatcgaggtggacatcacctacgccgagtacttcgagatgagcgtgcgcctggccgaggccatgaagcgctacggcctgaacaccaaccaccgcatcgtggtgtgcagcgagaacagcctgcagttcttcatgcccgtgctgggcgccctgttcatcggcgtggccgtggcccccgccaacgacatctacaacgagcgcgagctgctgaacagcatgggcatcagccagcccaccgtggtgttcgtgagcaagaagggcctgcagaagatcctgaacgtgcagaagaagctgcccatcatccagaagatcatcatcatggacagcaagaccgactaccagggcttccagagcatgtacaccttcgtgaccagccacctgccccccggcttcaacgagtacgacttcgtgcccgagagcttcgaccgcgacaagaccatcgccctgatcatgaacagcagcggcagcaccggcctgcccaagggcgtggccctgccccaccgcaccgcctgcgtgcgcttcagccacgcccgcgaccccatcttcggcaaccagatcatccccgacaccgccatcctgagcgtggtgcccttccaccacggcttcggcatgttcaccaccctgggctacctgatctgcggcttccgcgtggtgctgatgtaccgcttcgaggaggagctgttcctgcgcagcctgcaggactacaagatccagagcgccctgctggtgcccaccctgttcagcttcttcgccaagagcaccctgatcgacaagtacgacctgagcaacctgcacgagatcgccagcggcggcgcccccctgagcaaggaggtgggcgaggccgtggccaagcgcttccacctgcccggcatccgccagggctacggcctgaccgagaccaccagcgccatcctgatcacccccgagggcgacgacaagcccggcgccgtgggcaaggtggtgcccttcttcgaggccaaggtggtggacctggacaccggcaagaccctgggcgtgaaccagcgcggcgagctgtgcgtgcgcggccccatgatcatgagcggctacgtgaacaaccccgaggccaccaacgccctgatcgacaaggacggctggctgcacagcggcgacatcgcctactgggacgaggacgagcacttcttcatcgtggaccgcctgaagagcctgatcaagtacaagggctaccaggtggcccccgccgagctggagagcatcctgctgcagcaccccaacatcttcgacgccggcgtggccggcctgcccgacgacgacgccggcgagctgcccgccgccgtggtggtgctggagcacggcaagaccatgaccgagaaggagatcgtggactacgtggccagccaggtgaccaccgccaagaagctgcgcggcggcgtggtgttcgtggacgaggtgcccaagggcctgaccggcaagctggacgcccgcaagatccgcgagatcctgatcaaggccaagaagggcggcaagatcgccgtgtcaggtggatcctagataacctttaccttcattccctgtaaattggtaccctgcaaagctttcgttcgtatcatcggtttcgacaacgttcgtcaagttcaatgcatcagtttcattgcgcacacaccagaatcctactgagtttgagtattatggcattgggaaaactgtttttcttgtaccatttgttgtgcttgtaatttactgtgttttttattcggttttcgctatcgaactgtgaaatggaaatggatggagaagagttaatgaatgatatggtccttttgttcattctcaaattaatattatttgttttttctcttatttgttgtgtgttgaatttgaaattataagagatatgcaaacattttgttttgagtaaaaatgtgtcaaatcgtggcctctaatgaccgaagttaatatgaggagtaaaacacttgtagttgtaccattatgcttattcactaggcaacaaatatattttcagacctagaaaagctgcaaatgttactgaatacaagtatgtcctcttgtgttttagacatttatgaactttcctttatgtaattttccagaatccttgtcagattctaatcattgctttataattatagttatactcatggatttgtagttgagtatgaaaatattttttaatgcattttatgacttgccaattgattgacaacatgcatcaatcgactagtcgacgagtcagtaataaacggcgtcaaagtggttgcagccggcacacacgagtcgtgtttatcaactcaaagcacaaatacttttcctcaacctaaaaataaggcaattagccaaaaacaactttgcgtgtaaacaacgctcaatacacgtgtcattttattattagctattgcttcaccgccttagctttctcgtgacctagtcgtcctcgtcttttcttcttcttcttctataaaacaatacccaaagagctcttcttcttcacaattcagatttcaatttctcaaaatcttaaaaactttctctcaattctctctaccgtgatcaaggtaaatttctgtgttccttattctctcaaaatcttcgattttgttttcgttcgatcccaatttcgtatatgttctttggtttagattctgttaatcttagatcgaagacgattttctgggtttgatcgttagatatcatcttaattctcgattagggtttcatagatatcatccgatttgttcaaataatttgagttttgtcgaataattactcttcgatttgtgatttctatctagatctggtgttagtttctagtttgtgcgatcgaatttgtagattaatctgagtttttctgattaacaccacaccaatctggtaccagaaaaggggagaagcaaaaccatgggtaaaaagcctgaactcaccgcgacgtctgtcgagaagtttctgatcgaaaagttcgacagcgtctccgacctgatgcagctctcggagggcgaagaatctcgtgctttcagcttcgatgtaggagggcgtggatatgtcctgcgggtaaatagctgcgccgatggtttctacaaagatcgttatgtttatcggcactttgcatcggccgcgctcccgattccggaagtgcttgacattggggcattcagcgagagcctgacctattgcatctcccgccgtgcacagggtgtcacgttgcaagacctgcctgaaaccgaactgcccgctgttctgcaaccggtcgcggaggcgatggatgccatcgctgcggccgatcttagccagacgagcgggttcggcccattcggaccgcaaggaatcggtcaatacactacatggcgtgatttcatatgcgcgattgctgatccccatgtgtatcactggcaaactgtgatggacgacaccgtcagtgcgtccgtcgcgcaggctctcgatgagctgatgctttgggccgaggactgccccgaagtccggcacctcgtgcacgcggatttcggctccaacaatgtcctgacggacaatggccgcataacagcggtcattgactggagcgaggcgatgttcggggattcccaatacgaggtcgccaacatcttcttctggaggccgtggttggcttgtatggagcagcagacgcgctacttcgagcggaggcatccggagcttgcaggatcgccgcggctccgggcgtatatgctccgcattggtcttgaccaactctatcagagcttggttgacggcaatttcgatgatgcagcttgggcgcagggtcgatgcgacgcaatcgtccgatccggagccgggactgtcgggcgtacacaaatcgcccgcagaagcgcggccgtctggaccgatggctgtgtagaagtactcgccgatagtggaaaccgacgccccagcactcgtccgagggcaaaggaatagatgcatcctgctttaatgagatatgcgagacgcctatgatcgcatgatatttgctttcaattctgttgtgcacgttgtaaaaaacctgagcatgtgtagctcagatccttaccgccggtttcggttcattctaatgaatatatcacccgttactatcgtatttttatgaataatattctccgttcaatttactgattgtaccctactacttatatgtacaatattaaaatgaaaacaatatattgtgctgaataggtttatagcgacatctatgatagagcgccacaataacaaacaattgcgttttattattacaaatccaattttaaaaaaagcggcagaaccggtcaaacctaaaagactgattacataaatcttattcaaatttcaaaagtgccccaggggctagtatctacgacacaccgagcggcgaactaataacgctcactgaagggaactccggttccccgccggcgcgcatgggtgagattccttgaagttgagtattggccgtccgctctaccgaaagttacgggcaccattcaacccggtccagcacggcggccgggtaaccgacttgctgccccgagaattatgcagcatttttttggtgtatgtgggccccaaatgaagtgcaggtcaaaccttgacagtgacgacaaatcgttgggcgggtccagggcgaattttgcgacaacatgtcgaggctcagcaggaccggcatgcaagctagcttactagtgatattctatagtgtcacctaaatgtattctagaccaagcatgcacagctggcgttctcagccagatccaacgttacaccacaatatatcctgccaagatctaattccggggatcggaaatccagaagcccgagaggttgccgcctttcgggctttttctttttcaaaaaaaaaaatttataaaacgatctgttgcggccggccgccgggttgtgggcaaaggcgctcgacggtgggcaaccgcttgcggttgtccacgggcggagccggtgcgcgtagcgcattgtccacaagccaagggcgaccaataattgatatatatattcataattgaaaagctaattgaacatactacttgctgtaactacttgccggagcgaggggtgtttgcaagctgttgatctgaaagggctattagcgttctcacgtgcctttttgattagcgatttcacgtgaccttattagcgatttcacgtactccgattagcgatttcacgtaccctgattagcgatttcacgtggatagtttttggagcgggccggaaagccccgtgaatcaaggctttgcggggcattagcggtttcacgtggataactaccctctatccacaggcttccggggataaaaaagcccgctcgacggcgggctgttggatggggatcgcctgaatcgccccatcatccagccagaaagtgagggagccacggttgatgagagctttgttgtaggtggaccagttggtgattttgaacttttgctttgccacggaacggtctgcgttgtcgggaagatgcgtgatctgatccttcaactcagcaaaagttcgatttattcaacaaagccacgttgtgtctcaaaatctctgatgttacattgcacaagataaaaatatatcatcatgaacaataaaactgtctgcttacataaacagtaatacaaggggtgttatgagggaagcggtgatcgccgaagtatcgactcaactatcagaggtagttggcgtcatcgagcgccatctcgaaccgacgttgctggccgtacatttgtacggctccgcagtggatggcggcctgaagccacacagtgatattgatttgctggttacggtgaccgtaaggcttgatgaaacaacgcggcgagctttgatcaacgaccttttggaaacttcggcttcccctggagagagcgagattctccgcgctgtagaagtcaccattgttgtgcacgacgacatcattccgtggcgttatccagctaagcgcgaactgcaatttggagaatggcagcgcaatgacattcttgcaggtatcttcgagccagccacgatcgacattgatctggctatcttgctgacaaaagcaagagaacatagcgttgccttggtaggtccagcggcggaggaactctttgatccggttcctgaacaggatctatttgaggcgctaaatgaaaccttaacgctatggaactcgccgcccgactgggctggcgatgagcgaaatgtagtgcttacgttgtcccgcatttggtacagcgcagtaaccggcaaaatcgcgccgaaggatgtcgctgccgactgggcaatggagcgcctgccggcccagtatcagcccgtcatacttgaagctaggcaggcttatcttggacaagaagatcgcttggcctcgcgcgcagatcagttggaagaatttgttcactacgtgaaaggcgagatcaccaaggtagtcggcaaataatcactagaccaatgttacacatatatactttagattgatttaaaacttcatttttaatttaaaaggatctaggtgaagatcctttttgataatctcatgaccaaaatcccttaacgtgagttttcgttccactgagcgtcagaccccgtagaaaagatcaaaggatcttcttgagatcctttttttctgcgcgtaatctgctgcttgcaaacaaaaaaaccaccgctaccagcggtggtttgtttgccggatcaagagctaccaactcttcttccgaaggtaactggcttcagcagagcgcagataccaaatactgttcttctagtgtagccgtagttaggccaccacttcaagaactctgtagcaccgcctacatacctcgctctgctaatcctgttaccagtggctgctgccagtggcgataagtcgtgtcttaccgggttggactcaagacgatagttaccggataaggcgcagcggtcgggctgaacggggggttcgtgcacacagcccagcttggagcgaacgacctacaccgaactgagatacctacagcgtgagctatgagaaagcgccacgcttcccgaagggagaaaggcggacaggtatccggtaagcggcagggtcggaacaggagagcgcacgagggagcttccagggggaaacgcctggtatctttatagtcctgtcgggtttcgccacctctgacttgagcgtcgatttttgtgatgctcgtcaggggggcggagcctatggaaaaacgccagcaacgcggcctttttacggttcctggccttttgctggccttttgctcacatgagatctcaaacaaacacatacagcgacttagtttacccgccaatatatcctgtcaaggctcgaactaggctcggacgaagtaagcggccgcaaccttaattaaacacggcgcgccaacagcgatcgcaccaggtacc

SEQ ID NO: 243 - protein, 7954 aa, synthetic construct
  REGION 1..7954: note = pAGS-0006 MAS promoter
ACCTGTGTAATGTATTGGTAATTTGGGAAGATATAATAGGAAGCAAGGCTATTTATCCATTTCTGAAAAGGCGAAATGGCGTCACCGCGAGCGTCACGCGCATTCCGTTCTTGCTGTAAAGCGTTGTTTGGTACACTTTTGACTAGCGAGGCTTGGCGTGTCAGCGTATCTATTCAAAAGTCGTTAATGGCTGCGGATCAAGAAAAAGTTGGAATAGAAACAGAATACCCGCGAAATTCAGGCCCGGTTGCCATGTCCTACACGCCGAAATAAACGACCAAATTAGTAGAAAAATAAAAACTGACTCGGATACTTACGTCACGTCTTGCGCACTGATTTGAAAAATCTCAATATAAACAAAGACGGCCACAAGAAAAAACCAAAACACCGATATTCATTAATCTTATCTAGTTTCTCAAAAAAATCATAACAGTATTCAGTCGACTGGTACCAACAGGCTATGGAGGACGCCAAGAACATCAAGAAGGGCCCCGCCCCCTTCTACCCCCTGGAGGACGGCACCGCCGGCGAGCAGCTGCACAAGGCCATGAAGCGCTACGCCCTGGTGCCCGGCACCATCGCCTTCACCGACGCCCACATCGAGGTGGACATCACCTACGCCGAGTACTTCGAGATGAGCGTGCGCCTGGCCGAGGCCATGAAGCGCTACGGCCTGAACACCAACCACCGCATCGTGGTGTGCAGCGAGAACAGCCTGCAGTTCTTCATGCCCGTGCTGGGCGCCCTGTTCATCGGCGTGGCCGTGGCCCCCGCCAACGACATCTACAACGAGCGCGAGCTGCTGAACAGCATGGGCATCAGCCAGCCCACCGTGGTGTTCGTGAGCAAGAAGGGCCTGCAGAAGATCCTGAACGTGCAGAAGAAGCTGCCCATCATCCAGAAGATCATCATCATGGACAGCAAGACCGACTACCAGGGCTTCCAGAGCATGTACACCTTCGTGACCAGCCACCTGCCCCCCGGCTTCAACGAGTACGACTTCGTGCCCGAGAGCTTCGACCGCGACAAGACCATCGCCCTGATCATGAACAGCAGCGGCAGCACCGGCCTGCCCAAGGGCGTGGCCCTGCCCCACCGCACCGCCTGCGTGCGCTTCAGCCACGCCCGCGACCCCATCTTCGGCAACCAGATCATCCCCGACACCGCCATCCTGAGCGTGGTGCCCTTCCACCACGGCTTCGGCATGTTCACCACCCTGGGCTACCTGATCTGCGGCTTCCGCGTGGTGCTGATGTACCGCTTCGAGGAGGAGCTGTTCCTGCGCAGCCTGCAGGACTACAAGATCCAGAGCGCCCTGCTGGTGCCCACCCTGTTCAGCTTCTTCGCCAAGAGCACCCTGATCGACAAGTACGACCTGAGCAACCTGCACGAGATCGCCAGCGGCGGCGCCCCCCTGAGCAAGGAGGTGGGCGAGGCCGTGGCCAAGCGCTTCCACCTGCCCGGCATCCGCCAGGGCTACGGCCTGACCGAGACCACCAGCGCCATCCTGATCACCCCCGAGGGCGACGACAAGCCCGGCGCCGTGGGCAAGGTGGTGCCCTTCTTCGAGGCCAAGGTGGTGGACCTGGACACCGGCAAGACCCTGGGCGTGAACCAGCGCGGCGAGCTGTGCGTGCGCGGCCCCATGATCATGAGCGGCTACGTGAACAACCCCGAGGCCACCAACGCCCTGATCGACAAGGACGGCTGGCTGCACAGCGGCGACATCGCCTACTGGGACGAGGACGAGCACTTCTTCATCGTGGACCGCCTGAAGAGCCTGATCAAGTACAAGGGCTACCAGGTGGCCCCCGCCGAGCTGGAGAGCATCCTGCTGCAGCACCCCAACATCTTCGACGCCGGCGTGGCCGGCCTGCCCGACGACGACGCCGGCGAGCTGCCCGCCGCCGTGGTGGTGCTGGAGCACGGCAAGACCATGACCGAGAAGGAGATCGTGGACTACGTGGCCAGCCAGGTGACCACCGCCAAGAAGCTGCGCGGCGGCGTGGTGTTCGTGGACGAGGTGCCCAAGGGCCTGACCGGCAAGCTGGACGCCCGCAAGATCCGCGAGATCCTGATCAAGGCCAAGAAGGGCGGCAAGATCGCCGTGTCAGGTGGATCCTAGATAACCTTTACCTTCATTCCCTGTAAATTGGTACCCTGCAAAGCTTTCGTTCGTATCATCGGTTTCGACAACGTTCGTCAAGTTCAATGCATCAGTTTCATTGCGCACACACCAGAATCCTACTGAGTTTGAGTATTATGGCATTGGGAAAACTGTTTTTCTTGTACCATTTGTTGTGCTTGTAATTTACTGTGTTTTTTATTCGGTTTTCGCTATCGAACTGTGAAATGGAAATGGATGGAGAAGAGTTAATGAATGATATGGTCCTTTTGTTCATTCTCAAATTAATATTATTTGTTTTTTCTCTTATTTGTTGTGTGTTGAATTTGAAATTATAAGAGATATGCAAACATTTTGTTTTGAGTAAAAATGTGTCAAATCGTGGCCTCTAATGACCGAAGTTAATATGAGGAGTAAAACACTTGTAGTTGTACCATTATGCTTATTCACTAGGCAACAAATATATTTTCAGACCTAGAAAAGCTGCAAATGTTACTGAATACAAGTATGTCCTCTTGTGTTTTAGACATTTATGAACTTTCCTTTATGTAATTTTCCAGAATCCTTGTCAGATTCTAATCATTGCTTTATAATTATAGTTATACTCATGGATTTGTAGTTGAGTATGAAAATATTTTTTAATGCATTTTATGACTTGCCAATTGATTGACAACATGCATCAATCGACTAGTCGACGAGTCAGTAATAAACGGCGTCAAAGTGGTTGCAGCCGGCACACACGAGTCGTGTTTATCAACTCAAAGCACAAATACTTTTCCTCAACCTAAAAATAAGGCAATTAGCCAAAAACAACTTTGCGTGTAAACAACGCTCAATACACGTGTCATTTTATTATTAGCTATTGCTTCACCGCCTTAGCTTTCTCGTGACCTAGTCGTCCTCGTCTTTTCTTCTTCTTCTTCTATAAAACAATACCCAAAGAGCTCTTCTTCTTCACAATTCAGATTTCAATTTCTCAAAATCTTAAAAACTTTCTCTCAATTCTCTCTACCGTGATCAAGGTAAATTTCTGTGTTCCTTATTCTCTCAAAATCTTCGATTTTGTTTTCGTTCGATCCCAATTTCGTATATGTTCTTTGGTTTAGATTCTGTTAATCTTAGATCGAAGACGATTTTCTGGGTTTGATCGTTAGATATCATCTTAATTCTCGATTAGGGTTTCATAGATATCATCCGATTTGTTCAAATAATTTGAGTTTTGTCGAATAATTACTCTTCGATTTGTGATTTCTATCTAGATCTGGTGTTAGTTTCTAGTTTGTGCGATCGAATTTGTAGATTAATCTGAGTTTTTCTGATTAACACCACACCAATCTGGTACCAGAAAAGGGGAGAAGCAAAACCATGGGTAAAAAGCCTGAACTCACCGCGACGTCTGTCGAGAAGTTTCTGATCGAAAAGTTCGACAGCGTCTCCGACCTGATGCAGCTCTCGGAGGGCGAAGAATCTCGTGCTTTCAGCTTCGATGTAGGAGGGCGTGGATATGTCCTGCGGGTAAATAGCTGCGCCGATGGTTTCTACAAAGATCGTTATGTTTATCGGCACTTTGCATCGGCCGCGCTCCCGATTCCGGAAGTGCTTGACATTGGGGCATTCAGCGAGAGCCTGACCTATTGCATCTCCCGCCGTGCACAGGGTGTCACGTTGCAAGACCTGCCTGAAACCGAACTGCCCGCTGTTCTGCAACCGGTCGCGGAGGCGATGGATGCCATCGCTGCGGCCGATCTTAGCCAGACGAGCGGGTTCGGCCCATTCGGACCGCAAGGAATCGGTCAATACACTACATGGCGTGATTTCATATGCGCGATTGCTGATCCCCATGTGTATCACTGGCAAACTGTGATGGACGACACCGTCAGTGCGTCCGTCGCGCAGGCTCTCGATGAGCTGATGCTTTGGGCCGAGGACTGCCCCGAAGTCCGGCACCTCGTGCACGCGGATTTCGGCTCCAACAATGTCCTGACGGACAATGGCCGCATAACAGCGGTCATTGACTGGAGCGAGGCGATGTTCGGGGATTCCCAATACGAGGTCGCCAACATCTTCTTCTGGAGGCCGTGGTTGGCTTGTATGGAGCAGCAGACGCGCTACTTCGAGCGGAGGCATCCGGAGCTTGCAGGATCGCCGCGGCTCCGGGCGTATATGCTCCGCATTGGTCTTGACCAACTCTATCAGAGCTTGGTTGACGGCAATTTCGATGATGCAGCTTGGGCGCAGGGTCGATGCGACGCAATCGTCCGATCCGGAGCCGGGACTGTCGGGCGTACACAAATCGCCCGCAGAAGCGCGGCCGTCTGGACCGATGGCTGTGTAGAAGTACTCGCCGATAGTGGAAACCGACGCCCCAGCACTCGTCCGAGGGCAAAGGAATAGATGCATCCTGCTTTAATGAGATATGCGAGACGCCTATGATCGCATGATATTTGCTTTCAATTCTGTTGTGCACGTTGTAAAAAACCTGAGCATGTGTAGCTCAGATCCTTACCGCCGGTTTCGGTTCATTCTAATGAATATATCACCCGTTACTATCGTATTTTTATGAATAATATTCTCCGTTCAATTTACTGATTGTACCCTACTACTTATATGTACAATATTAAAATGAAAACAATATATTGTGCTGAATAGGTTTATAGCGACATCTATGATAGAGCGCCACAATAACAAACAATTGCGTTTTATTATTACAAATCCAATTTTAAAAAAAGCGGCAGAACCGGTCAAACCTAAAAGACTGATTACATAAATCTTATTCAAATTTCAAAAGTGCCCCAGGGGCTAGTATCTACGACACACCGAGCGGCGAACTAATAACGCTCACTGAAGGGAACTCCGGTTCCCCGCCGGCGCGCATGGGTGAGATTCCTTGAAGTTGAGTATTGGCCGTCCGCTCTACCGAAAGTTACGGGCACCATTCAACCCGGTCCAGCACGGCGGCCGGGTAACCGACTTGCTGCCCCGAGAATTATGCAGCATTTTTTTGGTGTATGTGGGCCCCAAATGAAGTGCAGGTCAAACCTTGACAGTGACGACAAATCGTTGGGCGGGTCCAGGGCGAATTTTGCGACAACATGTCGAGGCTCAGCAGGACCGGCATGCAAGCTAGCTTACTAGTGATATTCTATAGTGTCACCTAAATGTATTCTAGACCAAGCATGCACAGCTGGCGTTCTCAGCCAGATCCAACGTTACACCACAATATATCCTGCCAAGATCTAATTCCGGGGATCGGAAATCCAGAAGCCCGAGAGGTTGCCGCCTTTCGGGCTTTTTCTTTTTCAAAAAAAAAAATTTATAAAACGATCTGTTGCGGCCGGCCGCCGGGTTGTGGGCAAAGGCGCTCGACGGTGGGCAACCGCTTGCGGTTGTCCACGGGCGGAGCCGGTGCGCGTAGCGCATTGTCCACAAGCCAAGGGCGACCAATAATTGATATATATATTCATAATTGAAAAGCTAATTGAACATACTACTTGCTGTAACTACTTGCCGGAGCGAGGGGTGTTTGCAAGCTGTTGATCTGAAAGGGCTATTAGCGTTCTCACGTGCCTTTTTGATTAGCGATTTCACGTGACCTTATTAGCGATTTCACGTACTCCGATTAGCGATTTCACGTACCCTGATTAGCGATTTCACGTGGATAGTTTTTGGAGCGGGCCGGAAAGCCCCGTGAATCAAGGCTTTGCGGGGCATTAGCGGTTTCACGTGGATAACTACCCTCTATCCACAGGCTTCCGGGGATAAAAAAGCCCGCTCGACGGCGGGCTGTTGGATGGGGATCGCCTGAATCGCCCCATCATCCAGCCAGAAAGTGAGGGAGCCACGGTTGATGAGAGCTTTGTTGTAGGTGGACCAGTTGGTGATTTTGAACTTTTGCTTTGCCACGGAACGGTCTGCGTTGTCGGGAAGATGCGTGATCTGATCCTTCAACTCAGCAAAAGTTCGATTTATTCAACAAAGCCACGTTGTGTCTCAAAATCTCTGATGTTACATTGCACAAGATAAAAATATATCATCATGAACAATAAAACTGTCTGCTTACATAAACAGTAATACAAGGGGTGTTATGAGGGAAGCGGTGATCGCCGAAGTATCGACTCAACTATCAGAGGTAGTTGGCGTCATCGAGCGCCATCTCGAACCGACGTTGCTGGCCGTACATTTGTACGGCTCCGCAGTGGATGGCGGCCTGAAGCCACACAGTGATATTGATTTGCTGGTTACGGTGACCGTAAGGCTTGATGAAACAACGCGGCGAGCTTTGATCAACGACCTTTTGGAAACTTCGGCTTCCCCTGGAGAGAGCGAGATTCTCCGCGCTGTAGAAGTCACCATTGTTGTGCACGACGACATCATTCCGTGGCGTTATCCAGCTAAGCGCGAACTGCAATTTGGAGAATGGCAGCGCAATGACATTCTTGCAGGTATCTTCGAGCCAGCCACGATCGACATTGATCTGGCTATCTTGCTGACAAAAGCAAGAGAACATAGCGTTGCCTTGGTAGGTCCAGCGGCGGAGGAACTCTTTGATCCGGTTCCTGAACAGGATCTATTTGAGGCGCTAAATGAAACCTTAACGCTATGGAACTCGCCGCCCGACTGGGCTGGCGATGAGCGAAATGTAGTGCTTACGTTGTCCCGCATTTGGTACAGCGCAGTAACCGGCAAAATCGCGCCGAAGGATGTCGCTGCCGACTGGGCAATGGAGCGCCTGCCGGCCCAGTATCAGCCCGTCATACTTGAAGCTAGGCAGGCTTATCTTGGACAAGAAGATCGCTTGGCCTCGCGCGCAGATCAGTTGGAAGAATTTGTTCACTACGTGAAAGGCGAGATCACCAAGGTAGTCGGCAAATAATCACTAGACCAATGTTACACATATATACTTTAGATTGATTTAAAACTTCATTTTTAATTTAAAAGGATCTAGGTGAAGATCCTTTTTGATAATCTCATGACCAAAATCCCTTAACGTGAGTTTTCGTTCCACTGAGCGTCAGACCCCGTAGAAAAGATCAAAGGATCTTCTTGAGATCCTTTTTTTCTGCGCGTAATCTGCTGCTTGCAAACAAAAAAACCACCGCTACCAGCGGTGGTTTGTTTGCCGGATCAAGAGCTACCAACTCTTCTTCCGAAGGTAACTGGCTTCAGCAGAGCGCAGATACCAAATACTGTTCTTCTAGTGTAGCCGTAGTTAGGCCACCACTTCAAGAACTCTGTAGCACCGCCTACATACCTCGCTCTGCTAATCCTGTTACCAGTGGCTGCTGCCAGTGGCGATAAGTCGTGTCTTACCGGGTTGGACTCAAGACGATAGTTACCGGATAAGGCGCAGCGGTCGGGCTGAACGGGGGGTTCGTGCACACAGCCCAGCTTGGAGCGAACGACCTACACCGAACTGAGATACCTACAGCGTGAGCTATGAGAAAGCGCCACGCTTCCCGAAGGGAGAAAGGCGGACAGGTATCCGGTAAGCGGCAGGGTCGGAACAGGAGAGCGCACGAGGGAGCTTCCAGGGGGAAACGCCTGGTATCTTTATAGTCCTGTCGGGTTTCGCCACCTCTGACTTGAGCGTCGATTTTTGTGATGCTCGTCAGGGGGGCGGAGCCTATGGAAAAACGCCAGCAACGCGGCCTTTTTACGGTTCCTGGCCTTTTGCTGGCCTTTTGCTCACATGAGATCTCAAACAAACACATACAGCGACTTAGTTTACCCGCCAATATATCCTGTCAAGGCTCGAACTAGGCTCGGACGAAGTAAGCGGCCGCAACCTTAATTAAACACGGCGCGCCAACAGCGATCGCACCAGGTACC

SEQ ID NO: 244 - DNA, 8023 bp, synthetic construct
  misc_feature 1..8023: note = pAGS-0007 PAR promoter
  source 1..8023: mol_type = other DNA
acctgctgaggcttgacatgattggtgcgtatgtttgtatgaagctacaggactgatttggcgggctatgagggcgggggaagctctggaagggccgcgatggggcgcgcggcgtccagaaggcgccatacggcccgctggcggcacccatccggtataaaagcccgcgaccccgaacggtgacctccactttcagcgacaaacgagcacttatacatacgcgactattctgccgctatacataaccactcagctagcttaagatcccatcaagcttgcatgccgggcgcgccagaaggagcgcagccaaaccaggatgatgtttgatggggtatttgagcacttgcaacccttatccggaagccccctggcccacaaaggctaggcgccaatgcaagcagttcgcatgcagcccctggagcggtgccctcctgataaaccggccagggggcctatgttctttacttttttacaagagaagtcactcaacatcttaaaacagtattcagtcgactggtaccaacaggctatggaggacgccaagaacatcaagaagggccccgcccccttctaccccctggaggacggcaccgccggcgagcagctgcacaaggccatgaagcgctacgccctggtgcccggcaccatcgccttcaccgacgcccacatcgaggtggacatcacctacgccgagtacttcgagatgagcgtgcgcctggccgaggccatgaagcgctacggcctgaacaccaaccaccgcatcgtggtgtgcagcgagaacagcctgcagttcttcatgcccgtgctgggcgccctgttcatcggcgtggccgtggcccccgccaacgacatctacaacgagcgcgagctgctgaacagcatgggcatcagccagcccaccgtggtgttcgtgagcaagaagggcctgcagaagatcctgaacgtgcagaagaagctgcccatcatccagaagatcatcatcatggacagcaagaccgactaccagggcttccagagcatgtacaccttcgtgaccagccacctgccccccggcttcaacgagtacgacttcgtgcccgagagcttcgaccgcgacaagaccatcgccctgatcatgaacagcagcggcagcaccggcctgcccaagggcgtggccctgccccaccgcaccgcctgcgtgcgcttcagccacgcccgcgaccccatcttcggcaaccagatcatccccgacaccgccatcctgagcgtggtgcccttccaccacggcttcggcatgttcaccaccctgggctacctgatctgcggcttccgcgtggtgctgatgtaccgcttcgaggaggagctgttcctgcgcagcctgcaggactacaagatccagagcgccctgctggtgcccaccctgttcagcttcttcgccaagagcaccctgatcgacaagtacgacctgagcaacctgcacgagatcgccagcggcggcgcccccctgagcaaggaggtgggcgaggccgtggccaagcgcttccacctgcccggcatccgccagggctacggcctgaccgagaccaccagcgccatcctgatcacccccgagggcgacgacaagcccggcgccgtgggcaaggtggtgcccttcttcgaggccaaggtggtggacctggacaccggcaagaccctgggcgtgaaccagcgcggcgagctgtgcgtgcgcggccccatgatcatgagcggctacgtgaacaaccccgaggccaccaacgccctgatcgacaaggacggctggctgcacagcggcgacatcgcctactgggacgaggacgagcacttcttcatcgtggaccgcctgaagagcctgatcaagtacaagggctaccaggtggcccccgccgagctggagagcatcctgctgcagcaccccaacatcttcgacgccggcgtggccggcctgcccgacgacgacgccggcgagctgcccgccgccgtggtggtgctggagcacggcaagaccatgaccgagaaggagatcgtggactacgtggccagccaggtgaccaccgccaagaagctgcgcggcggcgtggtgttcgtggacgaggtgcccaagggcctgaccggcaagctggacgcccgcaagatccgcgagatcctgatcaaggccaagaagggcggcaagatcgccgtgtcaggtggatcctagataacctttaccttcattccctgtaaattggtaccctgcaaagctttcgttcgtatcatcggtttcgacaacgttcgtcaagttcaatgcatcagtttcattgcgcacacaccagaatcctactgagtttgagtattatggcattgggaaaactgtttttcttgtaccatttgttgtgcttgtaatttactgtgttttttattcggttttcgctatcgaactgtgaaatggaaatggatggagaagagttaatgaatgatatggtccttttgttcattctcaaattaatattatttgttttttctcttatttgttgtgtgttgaatttgaaattataagagatatgcaaacattttgttttgagtaaaaatgtgtcaaatcgtggcctctaatgaccgaagttaatatgaggagtaaaacacttgtagttgtaccattatgcttattcactaggcaacaaatatattttcagacctagaaaagctgcaaatgttactgaatacaagtatgtcctcttgtgttttagacatttatgaactttcctttatgtaattttccagaatccttgtcagattctaatcattgctttataattatagttatactcatggatttgtagttgagtatgaaaatattttttaatgcattttatgacttgccaattgattgacaacatgcatcaatcgactagtcgacgagtcagtaataaacggcgtcaaagtggttgcagccggcacacacgagtcgtgtttatcaactcaaagcacaaatacttttcctcaacctaaaaataaggcaattagccaaaaacaactttgcgtgtaaacaacgctcaatacacgtgtcattttattattagctattgcttcaccgccttagctttctcgtgacctagtcgtcctcgtcttttcttcttcttcttctataaaacaatacccaaagagctcttcttcttcacaattcagatttcaatttctcaaaatcttaaaaactttctctcaattctctctaccgtgatcaaggtaaatttctgtgttccttattctctcaaaatcttcgattttgttttcgttcgatcccaatttcgtatatgttctttggtttagattctgttaatcttagatcgaagacgattttctgggtttgatcgttagatatcatcttaattctcgattagggtttcatagatatcatccgatttgttcaaataatttgagttttgtcgaataattactcttcgatttgtgatttctatctagatctggtgttagtttctagtttgtgcgatcgaatttgtagattaatctgagtttttctgattaacaccacaccaatctggtaccagaaaaggggagaagcaaaaccatgggtaaaaagcctgaactcaccgcgacgtctgtcgagaagtttctgatcgaaaagttcgacagcgtctccgacctgatgcagctctcggagggcgaagaatctcgtgctttcagcttcgatgtaggagggcgtggatatgtcctgcgggtaaatagctgcgccgatggtttctacaaagatcgttatgtttatcggcactttgcatcggccgcgctcccgattccggaagtgcttgacattggggcattcagcgagagcctgacctattgcatctcccgccgtgcacagggtgtcacgttgcaagacctgcctgaaaccgaactgcccgctgttctgcaaccggtcgcggaggcgatggatgccatcgctgcggccgatcttagccagacgagcgggttcggcccattcggaccgcaaggaatcggtcaatacactacatggcgtgatttcatatgcgcgattgctgatccccatgtgtatcactggcaaactgtgatggacgacaccgtcagtgcgtccgtcgcgcaggctctcgatgagctgatgctttgggccgaggactgccccgaagtccggcacctcgtgcacgcggatttcggctccaacaatgtcctgacggacaatggccgcataacagcggtcattgactggagcgaggcgatgttcggggattcccaatacgaggtcgccaacatcttcttctggaggccgtggttggcttgtatggagcagcagacgcgctacttcgagcggaggcatccggagcttgcaggatcgccgcggctccgggcgtatatgctccgcattggtcttgaccaactctatcagagcttggttgacggcaatttcgatgatgcagcttgggcgcagggtcgatgcgacgcaatcgtccgatccggagccgggactgtcgggcgtacacaaatcgcccgcagaagcgcggccgtctggaccgatggctgtgtagaagtactcgccgatagtggaaaccgacgccccagcactcgtccgagggcaaaggaatagatgcatcctgctttaatgagatatgcgagacgcctatgatcgcatgatatttgctttcaattctgttgtgcacgttgtaaaaaacctgagcatgtgtagctcagatccttaccgccggtttcggttcattctaatgaatatatcacccgttactatcgtatttttatgaataatattctccgttcaatttactgattgtaccctactacttatatgtacaatattaaaatgaaaacaatatattgtgctgaataggtttatagcgacatctatgatagagcgccacaataacaaacaattgcgttttattattacaaatccaattttaaaaaaagcggcagaaccggtcaaacctaaaagactgattacataaatcttattcaaatttcaaaagtgccccaggggctagtatctacgacacaccgagcggcgaactaataacgctcactgaagggaactccggttccccgccggcgcgcatgggtgagattccttgaagttgagtattggccgtccgctctaccgaaagttacgggcaccattcaacccggtccagcacggcggccgggtaaccgacttgctgccccgagaattatgcagcatttttttggtgtatgtgggccccaaatgaagtgcaggtcaaaccttgacagtgacgacaaatcgttgggcgggtccagggcgaattttgcgacaacatgtcgaggctcagcaggaccggcatgcaagctagcttactagtgatattctatagtgtcacctaaatgtattctagaccaagcatgcacagctggcgttctcagccagatccaacgttacaccacaatatatcctgccaagatctaattccggggatcggaaatccagaagcccgagaggttgccgcctttcgggctttttctttttcaaaaaaaaaaatttataaaacgatctgttgcggccggccgccgggttgtgggcaaaggcgctcgacggtgggcaaccgcttgcggttgtccacgggcggagccggtgcgcgtagcgcattgtccacaagccaagggcgaccaataattgatatatatattcataattgaaaagctaattgaacatactacttgctgtaactacttgccggagcgaggggtgtttgcaagctgttgatctgaaagggctattagcgttctcacgtgcctttttgattagcgatttcacgtgaccttattagcgatttcacgtactccgattagcgatttcacgtaccctgattagcgatttcacgtggatagtttttggagcgggccggaaagccccgtgaatcaaggctttgcggggcattagcggtttcacgtggataactaccctctatccacaggcttccggggataaaaaagcccgctcgacggcgggctgttggatggggatcgcctgaatcgccccatcatccagccagaaagtgagggagccacggttgatgagagctttgttgtaggtggaccagttggtgattttgaacttttgctttgccacggaacggtctgcgttgtcgggaagatgcgtgatctgatccttcaactcagcaaaagttcgatttattcaacaaagccacgttgtgtctcaaaatctctgatgttacattgcacaagataaaaatatatcatcatgaacaataaaactgtctgcttacataaacagtaatacaaggggtgttatgagggaagcggtgatcgccgaagtatcgactcaactatcagaggtagttggcgtcatcgagcgccatctcgaaccgacgttgctggccgtacatttgtacggctccgcagtggatggcggcctgaagccacacagtgatattgatttgctggttacggtgaccgtaaggcttgatgaaacaacgcggcgagctttgatcaacgaccttttggaaacttcggcttcccctggagagagcgagattctccgcgctgtagaagtcaccattgttgtgcacgacgacatcattccgtggcgttatccagctaagcgcgaactgcaatttggagaatggcagcgcaatgacattcttgcaggtatcttcgagccagccacgatcgacattgatctggctatcttgctgacaaaagcaagagaacatagcgttgccttggtaggtccagcggcggaggaactctttgatccggttcctgaacaggatctatttgaggcgctaaatgaaaccttaacgctatggaactcgccgcccgactgggctggcgatgagcgaaatgtagtgcttacgttgtcccgcatttggtacagcgcagtaaccggcaaaatcgcgccgaaggatgtcgctgccgactgggcaatggagcgcctgccggcccagtatcagcccgtcatacttgaagctaggcaggcttatcttggacaagaagatcgcttggcctcgcgcgcagatcagttggaagaatttgttcactacgtgaaaggcgagatcaccaaggtagtcggcaaataatcactagaccaatgttacacatatatactttagattgatttaaaacttcatttttaatttaaaaggatctaggtgaagatcctttttgataatctcatgaccaaaatcccttaacgtgagttttcgttccactgagcgtcagaccccgtagaaaagatcaaaggatcttcttgagatcctttttttctgcgcgtaatctgctgcttgcaaacaaaaaaaccaccgctaccagcggtggtttgtttgccggatcaagagctaccaactcttcttccgaaggtaactggcttcagcagagcgcagataccaaatactgttcttctagtgtagccgtagttaggccaccacttcaagaactctgtagcaccgcctacatacctcgctctgctaatcctgttaccagtggctgctgccagtggcgataagtcgtgtcttaccgggttggactcaagacgatagttaccggataaggcgcagcggtcgggctgaacggggggttcgtgcacacagcccagcttggagcgaacgacctacaccgaactgagatacctacagcgtgagctatgagaaagcgccacgcttcccgaagggagaaaggcggacaggtatccggtaagcggcagggtcggaacaggagagcgcacgagggagcttccagggggaaacgcctggtatctttatagtcctgtcgggtttcgccacctctgacttgagcgtcgatttttgtgatgctcgtcaggggggcggagcctatggaaaaacgccagcaacgcggcctttttacggttcctggccttttgctggccttttgctcacatgagatctcaaacaaacacatacagcgacttagtttacccgccaatatatcctgtcaaggctcgaactaggctcggacgaagtaagcggccgcaaccttaattaaacacggcgcgccaacagcgatcgcaccaggtacc

SEQ ID NO: 245 - DNA, 8351 bp, synthetic construct
  misc_feature 1..8351: note = pAGS-0008 Cv PAS D promoter
  source 1..8351: mol_type = other DNA
acctgatcccacacacctgcccgtctgcctgacaggaagtgaacgcatgtcgagggaggcctcaccaatcgtcacacgagccctcgtcagaaacacgtctccgccacgctctccctctcactgccgaccccgcagcccttttgccctttcctaggccaccgacaggacccaggcgctctcagcatgcctcaacaacccgtactcgtgccagcggtgcccttgtgctggtgatcgcttggaagcgcatgcgaagacgaaggggcggagcaggcggcctggctgttcgaagggctcgccgccagttcgggtgcctttctccacgcgcgcctccacacctaccgatgcgtgaaggcaggcaaatgctcatgtttgcccgaactcggagtccttaaaaagccgcttcttgtcgtcgttccgagacatgttagcagatcgcagtgccacctttcctgacgcgctcggccccatattcggacgcaattgtcatttgtagcacaattggagcaaatctggcgaggcagtaggcttttaagttgcaaggcgagagagcaaagtgggacgcggcgtgattattggtatttacgcgacggcccggcgcgttagcggcccttcccccaggccagggacgattatgtatcaatattgttgcgttcgggcactcgtgcgagggctcctgcgggctggggagggggatctgggaattggaggtacgaccgagatggcttgctcggggggaggtttcctcgccgagcaagccagggttaggtgttgcgctcttgactcgttgtgcattctaggaccccactgctactcacaacaagccaaaacagtattcagtcgactggtaccaacaggctatggaggacgccaagaacatcaagaagggccccgcccccttctaccccctggaggacggcaccgccggcgagcagctgcacaaggccatgaagcgctacgccctggtgcccggcaccatcgccttcaccgacgcccacatcgaggtggacatcacctacgccgagtacttcgagatgagcgtgcgcctggccgaggccatgaagcgctacggcctgaacaccaaccaccgcatcgtggtgtgcagcgagaacagcctgcagttcttcatgcccgtgctgggcgccctgttcatcggcgtggccgtggcccccgccaacgacatctacaacgagcgcgagctgctgaacagcatgggcatcagccagcccaccgtggtgttcgtgagcaagaagggcctgcagaagatcctgaacgtgcagaagaagctgcccatcatccagaagatcatcatcatggacagcaagaccgactaccagggcttccagagcatgtacaccttcgtgaccagccacctgccccccggcttcaacgagtacgacttcgtgcccgagagcttcgaccgcgacaagaccatcgccctgatcatgaacagcagcggcagcaccggcctgcccaagggcgtggccctgccccaccgcaccgcctgcgtgcgcttcagccacgcccgcgaccccatcttcggcaaccagatcatccccgacaccgccatcctgagcgtggtgcccttccaccacggcttcggcatgttcaccaccctgggctacctgatctgcggcttccgcgtggtgctgatgtaccgcttcgaggaggagctgttcctgcgcagcctgcaggactacaagatccagagcgccctgctggtgcccaccctgttcagcttcttcgccaagagcaccctgatcgacaagtacgacctgagcaacctgcacgagatcgccagcggcggcgcccccctgagcaaggaggtgggcgaggccgtggccaagcgcttccacctgcccggcatccgccagggctacggcctgaccgagaccaccagcgccatcctgatcacccccgagggcgacgacaagcccggcgccgtgggcaaggtggtgcccttcttcgaggccaaggtggtggacctggacaccggcaagaccctgggcgtgaaccagcgcggcgagctgtgcgtgcgcggccccatgatcatgagcggctacgtgaacaaccccgaggccaccaacgccctgatcgacaaggacggctggctgcacagcggcgacatcgcctactgggacgaggacgagcacttcttcatcgtggaccgcctgaagagcctgatcaagtacaagggctaccaggtggcccccgccgagctggagagcatcctgctgcagcaccccaacatcttcgacgccggcgtggccggcctgcccgacgacgacgccggcgagctgcccgccgccgtggtggtgctggagcacggcaagaccatgaccgagaaggagatcgtggactacgtggccagccaggtgaccaccgccaagaagctgcgcggcggcgtggtgttcgtggacgaggtgcccaagggcctgaccggcaagctggacgcccgcaagatccgcgagatcctgatcaaggccaagaagggcggcaagatcgccgtgtcaggtggatcctagataacctttaccttcattccctgtaaattggtaccctgcaaagctttcgttcgtatcatcggtttcgacaacgttcgtcaagttcaatgcatcagtttcattgcgcacacaccagaatcctactgagtttgagtattatggcattgggaaaactgtttttcttgtaccatttgttgtgcttgtaatttactgtgttttttattcggttttcgctatcgaactgtgaaatggaaatggatggagaagagttaatgaatgatatggtccttttgttcattctcaaattaatattatttgttttttctcttatttgttgtgtgttgaatttgaaattataagagatatgcaaacattttgttttgagtaaaaatgtgtcaaatcgtggcctctaatgaccgaagttaatatgaggagtaaaacacttgtagttgtaccattatgcttattcactaggcaacaaatatattttcagacctagaaaagctgcaaatgttactgaatacaagtatgtcctcttgtgttttagacatttatgaactttcctttatgtaattttccagaatccttgtcagattctaatcattgctttataattatagttatactcatggatttgtagttgagtatgaaaatattttttaatgcattttatgacttgccaattgattgacaacatgcatcaatcgactagtcgacgagtcagtaataaacggcgtcaaagtggttgcagccggcacacacgagtcgtgtttatcaactcaaagcacaaatacttttcctcaacctaaaaataaggcaattagccaaaaacaactttgcgtgtaaacaacgctcaatacacgtgtcattttattattagctattgcttcaccgccttagctttctcgtgacctagtcgtcctcgtcttttcttcttcttcttctataaaacaatacccaaagagctcttcttcttcacaattcagatttcaatttctcaaaatcttaaaaactttctctcaattctctctaccgtgatcaaggtaaatttctgtgttccttattctctcaaaatcttcgattttgttttcgttcgatcccaatttcgtatatgttctttggtttagattctgttaatcttagatcgaagacgattttctgggtttgatcgttagatatcatcttaattctcgattagggtttcatagatatcatccgatttgttcaaataatttgagttttgtcgaataattactcttcgatttgtgatttctatctagatctggtgttagtttctagtttgtgcgatcgaatttgtagattaatctgagtttttctgattaacaccacaccaatctggtaccagaaaaggggagaagcaaaaccatgggtaaaaagcctgaactcaccgcgacgtctgtcgagaagtttctgatcgaaaagttcgacagcgtctccgacctgatgcagctctcggagggcgaagaatctcgtgctttcagcttcgatgtaggagggcgtggatatgtcctgcgggtaaatagctgcgccgatggtttctacaaagatcgttatgtttatcggcactttgcatcggccgcgctcccgattccggaagtgcttgacattggggcattcagcgagagcctgacctattgcatctcccgccgtgcacagggtgtcacgttgcaagacctgcctgaaaccgaactgcccgctgttctgcaaccggtcgcggaggcgatggatgccatcgctgcggccgatcttagccagacgagcgggttcggcccattcggaccgcaaggaatcggtcaatacactacatggcgtgatttcatatgcgcgattgctgatccccatgtgtatcactggcaaactgtgatggacgacaccgtcagtgcgtccgtcgcgcaggctctcgatgagctgatgctttgggccgaggactgccccgaagtccggcacctcgtgcacgcggatttcggctccaacaatgtcctgacggacaatggccgcataacagcggtcattgactggagcgaggcgatgttcggggattcccaatacgaggtcgccaacatcttcttctggaggccgtggttggcttgtatggagcagcagacgcgctacttcgagcggaggcatccggagcttgcaggatcgccgcggctccgggcgtatatgctccgcattggtcttgaccaactctatcagagcttggttgacggcaatttcgatgatgcagcttgggcgcagggtcgatgcgacgcaatcgtccgatccggagccgggactgtcgggcgtacacaaatcgcccgcagaagcgcggccgtctggaccgatggctgtgtagaagtactcgccgatagtggaaaccgacgccccagcactcgtccgagggcaaaggaatagatgcatcctgctttaatgagatatgcgagacgcctatgatcgcatgatatttgctttcaattctgttgtgcacgttgtaaaaaacctgagcatgtgtagctcagatccttaccgccggtttcggttcattctaatgaatatatcacccgttactatcgtatttttatgaataatattctccgttcaatttactgattgtaccctactacttatatgtacaatattaaaatgaaaacaatatattgtgctgaataggtttatagcgacatctatgatagagcgccacaataacaaacaattgcgttttattattacaaatccaattttaaaaaaagcggcagaaccggtcaaacctaaaagactgattacataaatcttattcaaatttcaaaagtgccccaggggctagtatctacgacacaccgagcggcgaactaataacgctcactgaagggaactccggttccccgccggcgcgcatgggtgagattccttgaagttgagtattggccgtccgctctaccgaaagttacgggcaccattcaacccggtccagcacggcggccgggtaaccgacttgctgccccgagaattatgcagcatttttttggtgtatgtgggccccaaatgaagtgcaggtcaaaccttgacagtgacgacaaatcgttgggcgggtccagggcgaattttgcgacaacatgtcgaggctcagcaggaccggcatgcaagctagcttactagtgatattctatagtgtcacctaaatgtattctagaccaagcatgcacagctggcgttctcagccagatccaacgttacaccacaatatatcctgccaagatctaattccggggatcggaaatccagaagcccgagaggttgccgcctttcgggctttttctttttcaaaaaaaaaaatttataaaacgatctgttgcggccggccgccgggttgtgggcaaaggcgctcgacggtgggcaaccgcttgcggttgtccacgggcggagccggtgcgcgtagcgcattgtccacaagccaagggcgaccaataattgatatatatattcataattgaaaagctaattgaacatactacttgctgtaactacttgccggagcgaggggtgtttgcaagctgttgatctgaaagggctattagcgttctcacgtgcctttttgattagcgatttcacgtgaccttattagcgatttcacgtactccgattagcgatttcacgtaccctgattagcgatttcacgtggatagtttttggagcgggccggaaagccccgtgaatcaaggctttgcggggcattagcggtttcacgtggataactaccctctatccacaggcttccggggataaaaaagcccgctcgacggcgggctgttggatggggatcgcctgaatcgccccatcatccagccagaaagtgagggagccacggttgatgagagctttgttgtaggtggaccagttggtgattttgaacttttgctttgccacggaacggtctgcgttgtcgggaagatgcgtgatctgatccttcaactcagcaaaagttcgatttattcaacaaagccacgttgtgtctcaaaatctctgatgttacattgcacaagataaaaatatatcatcatgaacaataaaactgtctgcttacataaacagtaatacaaggggtgttatgagggaagcggtgatcgccgaagtatcgactcaactatcagaggtagttggcgtcatcgagcgccatctcgaaccgacgttgctggccgtacatttgtacggctccgcagtggatggcggcctgaagccacacagtgatattgatttgctggttacggtgaccgtaaggcttgatgaaacaacgcggcgagctttgatcaacgaccttttggaaacttcggcttcccctggagagagcgagattctccgcgctgtagaagtcaccattgttgtgcacgacgacatcattccgtggcgttatccagctaagcgcgaactgcaatttggagaatggcagcgcaatgacattcttgcaggtatcttcgagccagccacgatcgacattgatctggctatcttgctgacaaaagcaagagaacatagcgttgccttggtaggtccagcggcggaggaactctttgatccggttcctgaacaggatctatttgaggcgctaaatgaaaccttaacgctatggaactcgccgcccgactgggctggcgatgagcgaaatgtagtgcttacgttgtcccgcatttggtacagcgcagtaaccggcaaaatcgcgccgaaggatgtcgctgccgactgggcaatggagcgcctgccggcccagtatcagcccgtcatacttgaagctaggcaggcttatcttggacaagaagatcgcttggcctcgcgcgcagatcagttggaagaatttgttcactacgtgaaaggcgagatcaccaaggtagtcggcaaataatcactagaccaatgttacacatatatactttagattgatttaaaacttcatttttaatttaaaaggatctaggtgaagatcctttttgataatctcatgaccaaaatcccttaacgtgagttttcgttccactgagcgtcagaccccgtagaaaagatcaaaggatcttcttgagatcctttttttctgcgcgtaatctgctgcttgcaaacaaaaaaaccaccgctaccagcggtggtttgtttgccggatcaagagctaccaactcttcttccgaaggtaactggcttcagcagagcgcagataccaaatactgttcttctagtgtagccgtagttaggccaccacttcaagaactctgtagcaccgcctacatacctcgctctgctaatcctgttaccagtggctgctgccagtggcgataagtcgtgtcttaccgggttggactcaagacgatagttaccggataaggcgcagcggtcgggctgaacggggggttcgtgcacacagcccagcttggagcgaacgacctacaccgaactgagatacctacagcgtgagctatgagaaagcgccacgcttcccgaagggagaaaggcggacaggtatccggtaagcggcagggtcggaacaggagagcgcacgagggagcttccagggggaaacgcctggtatctttatagtcctgtcgggtttcgccacctctgacttgagcgtcgatttttgtgatgctcgtcaggggggcggagcctatggaaaaacgccagcaacgcggcctttttacggttcctggccttttgctggccttttgctcacatgagatctcaaacaaacacatacagcgacttagtttacccgccaatatatcctgtcaaggctcgaactaggctcggacgaagtaagcggccgcaaccttaattaaacacggcgcgccaacagcgatcgcaccaggtacc

SEQ ID NO: 246 - DNA, 7734 bp, synthetic construct
  misc_feature 1..7734: note = pAGS-0009 CMV promoter
  source 1..7734: mol_type = other DNA
acctgtgatgcggttttggcagtacatcaatgggcgtggatagcggtttgactcacggggatttccaagtctccaccccattgacgtcaatgggagtttgttttggcaccaaaatcaacgggactttccaaaatgtcgtaacaactccgccccattgacgcaaatgggcggtaggcgtgtacggtgggaggtctatataagcagagctaacagtattcagtcgactggtaccaacaggctatggaggacgccaagaacatcaagaagggccccgcccccttctaccccctggaggacggcaccgccggcgagcagctgcacaaggccatgaagcgctacgccctggtgcccggcaccatcgccttcaccgacgcccacatcgaggtggacatcacctacgccgagtacttcgagatgagcgtgcgcctggccgaggccatgaagcgctacggcctgaacaccaaccaccgcatcgtggtgtgcagcgagaacagcctgcagttcttcatgcccgtgctgggcgccctgttcatcggcgtggccgtggcccccgccaacgacatctacaacgagcgcgagctgctgaacagcatgggcatcagccagcccaccgtggtgttcgtgagcaagaagggcctgcagaagatcctgaacgtgcagaagaagctgcccatcatccagaagatcatcatcatggacagcaagaccgactaccagggcttccagagcatgtacaccttcgtgaccagccacctgccccccggcttcaacgagtacgacttcgtgcccgagagcttcgaccgcgacaagaccatcgccctgatcatgaacagcagcggcagcaccggcctgcccaagggcgtggccctgccccaccgcaccgcctgcgtgcgcttcagccacgcccgcgaccccatcttcggcaaccagatcatccccgacaccgccatcctgagcgtggtgcccttccaccacggcttcggcatgttcaccaccctgggctacctgatctgcggcttccgcgtggtgctgatgtaccgcttcgaggaggagctgttcctgcgcagcctgcaggactacaagatccagagcgccctgctggtgcccaccctgttcagcttcttcgccaagagcaccctgatcgacaagtacgacctgagcaacctgcacgagatcgccagcggcggcgcccccctgagcaaggaggtgggcgaggccgtggccaagcgcttccacctgcccggcatccgccagggctacggcctgaccgagaccaccagcgccatcctgatcacccccgagggcgacgacaagcccggcgccgtgggcaaggtggtgcccttcttcgaggccaaggtggtggacctggacaccggcaagaccctgggcgtgaaccagcgcggcgagctgtgcgtgcgcggccccatgatcatgagcggctacgtgaacaaccccgaggccaccaacgccctgatcgacaaggacggctggctgcacagcggcgacatcgcctactgggacgaggacgagcacttcttcatcgtggaccgcctgaagagcctgatcaagtacaagggctaccaggtggcccccgccgagctggagagcatcctgctgcagcaccccaacatcttcgacgccggcgtggccggcctgcccgacgacgacgccggcgagctgcccgccgccgtggtggtgctggagcacggcaagaccatgaccgagaaggagatcgtggactacgtggccagccaggtgaccaccgccaagaagctgcgcggcggcgtggtgttcgtggacgaggtgcccaagggcctgaccggcaagctggacgcccgcaagatccgcgagatcctgatcaaggccaagaagggcggcaagatcgccgtgtcaggtggatcctagataacctttaccttcattccctgtaaattggtaccctgcaaagctttcgttcgtatcatcggtttcgacaacgttcgtcaagttcaatgcatcagtttcattgcgcacacaccagaatcctactgagtttgagtattatggcattgggaaaactgtttttcttgtaccatttgttgtgcttgtaatttactgtgttttttattcggttttcgctatcgaactgtgaaatggaaatggatggagaagagttaatgaatgatatggtccttttgttcattctcaaattaatattatttgttttttctcttatttgttgtgtgttgaatttgaaattataagagatatgcaaacattttgttttgagtaaaaatgtgtcaaatcgtggcctctaatgaccgaagttaatatgaggagtaaaacacttgtagttgtaccattatgcttattcactaggcaacaaatatattttcagacctagaaaagctgcaaatgttactgaatacaagtatgtcctcttgtgttttagacatttatgaactttcctttatgtaattttccagaatccttgtcagattctaatcattgctttataattatagttatactcatggatttgtagttgagtatgaaaatattttttaatgcattttatgacttgccaattgattgacaacatgcatcaatcgactagtcgacgagtcagtaataaacggcgtcaaagtggttgcagccggcacacacgagtcgtgtttatcaactcaaagcacaaatacttttcctcaacctaaaaataaggcaattagccaaaaacaactttgcgtgtaaacaacgctcaatacacgtgtcattttattattagctattgcttcaccgccttagctttctcgtgacctagtcgtcctcgtcttttcttcttcttcttctataaaacaatacccaaagagctcttcttcttcacaattcagatttcaatttctcaaaatcttaaaaactttctctcaattctctctaccgtgatcaaggtaaatttctgtgttccttattctctcaaaatcttcgattttgttttcgttcgatcccaatttcgtatatgttctttggtttagattctgttaatcttagatcgaagacgattttctgggtttgatcgttagatatcatcttaattctcgattagggtttcatagatatcatccgatttgttcaaataatttgagttttgtcgaataattactcttcgatttgtgatttctatctagatctggtgttagtttctagtttgtgcgatcgaatttgtagattaatctgagtttttctgattaacaccacaccaatctggtaccagaaaaggggagaagcaaaaccatgggtaaaaagcctgaactcaccgcgacgtctgtcgagaagtttctgatcgaaaagttcgacagcgtctccgacctgatgcagctctcggagggcgaagaatctcgtgctttcagcttcgatgtaggagggcgtggatatgtcctgcgggtaaatagctgcgccgatggtttctacaaagatcgttatgtttatcggcactttgcatcggccgcgctcccgattccggaagtgcttgacattggggcattcagcgagagcctgacctattgcatctcccgccgtgcacagggtgtcacgttgcaagacctgcctgaaaccgaactgcccgctgttctgcaaccggtcgcggaggcgatggatgccatcgctgcggccgatcttagccagacgagcgggttcggcccattcggaccgcaaggaatcggtcaatacactacatggcgtgatttcatatgcgcgattgctgatccccatgtgtatcactggcaaactgtgatggacgacaccgtcagtgcgtccgtcgcgcaggctctcgatgagctgatgctttgggccgaggactgccccgaagtccggcacctcgtgcacgcggatttcggctccaacaatgtcctgacggacaatggccgcataacagcggtcattgactggagcgaggcgatgttcggggattcccaatacgaggtcgccaacatcttcttctggaggccgtggttggcttgtatggagcagcagacgcgctacttcgagcggaggcatccggagcttgcaggatcgccgcggctccgggcgtatatgctccgcattggtcttgaccaactctatcagagcttggttgacggcaatttcgatgatgcagcttgggcgcagggtcgatgcgacgcaatcgtccgatccggagccgggactgtcgggcgtacacaaatcgcccgcagaagcgcggccgtctggaccgatggctgtgtagaagtactcgccgatagtggaaaccgacgccccagcactcgtccgagggcaaaggaatagatgcatcctgctttaatgagatatgcgagacgcctatgatcgcatgatatttgctttcaattctgttgtgcacgttgtaaaaaacctgagcatgtgtagctcagatccttaccgccggtttcggttcattctaatgaatatatcacccgttactatcgtatttttatgaataatattctccgttcaatttactgattgtaccctactacttatatgtacaatattaaaatgaaaacaatatattgtgctgaataggtttatagcgacatctatgatagagcgccacaataacaaacaattgcgttttattattacaaatccaattttaaaaaaagcggcagaaccggtcaaacctaaaagactgattacataaatcttattcaaatttcaaaagtgccccaggggctagtatctacgacacaccgagcggcgaactaataacgctcactgaagggaactccggttccccgccggcgcgcatgggtgagattccttgaagttgagtattggccgtccgctctaccgaaagttacgggcaccattcaacccggtccagcacggcggccgggtaaccgacttgctgccccgagaattatgcagcatttttttggtgtatgtgggccccaaatgaagtgcaggtcaaaccttgacagtgacgacaaatcgttgggcgggtccagggcgaattttgcgacaacatgtcgaggctcagcaggaccggcatgcaagctagcttactagtgatattctatagtgtcacctaaatgtattctagaccaagcatgcacagctggcgttctcagccagatccaacgttacaccacaatatatcctgccaagatctaattccggggatcggaaatccagaagcccgagaggttgccgcctttcgggctttttctttttcaaaaaaaaaaatttataaaacgatctgttgcggccggccgccgggttgtgggcaaaggcgctcgacggtgggcaaccgcttgcggttgtccacgggcggagccggtgcgcgtagcgcattgtccacaagccaagggcgaccaataattgatatatatattcataattgaaaagctaattgaacatactacttgctgtaactacttgccggagcgaggggtgtttgcaagctgttgatctgaaagggctattagcgttctcacgtgcctttttgattagcgatttcacgtgaccttattagcgatttcacgtactccgattagcgatttcacgtaccctgattagcgatttcacgtggatagtttttggagcgggccggaaagccccgtgaatcaaggctttgcggggcattagcggtttcacgtggataactaccctctatccacaggcttccggggataaaaaagcccgctcgacggcgggctgttggatggggatcgcctgaatcgccccatcatccagccagaaagtgagggagccacggttgatgagagctttgttgtaggtggaccagttggtgattttgaacttttgctttgccacggaacggtctgcgttgtcgggaagatgcgtgatctgatccttcaactcagcaaaagttcgatttattcaacaaagccacgttgtgtctcaaaatctctgatgttacattgcacaagataaaaatatatcatcatgaacaataaaactgtctgcttacataaacagtaatacaaggggtgttatgagggaagcggtgatcgccgaagtatcgactcaactatcagaggtagttggcgtcatcgagcgccatctcgaaccgacgttgctggccgtacatttgtacggctccgcagtggatggcggcctgaagccacacagtgatattgatttgctggttacggtgaccgtaaggcttgatgaaacaacgcggcgagctttgatcaacgaccttttggaaacttcggcttcccctggagagagcgagattctccgcgctgtagaagtcaccattgttgtgcacgacgacatcattccgtggcgttatccagctaagcgcgaactgcaatttggagaatggcagcgcaatgacattcttgcaggtatcttcgagccagccacgatcgacattgatctggctatcttgctgacaaaagcaagagaacatagcgttgccttggtaggtccagcggcggaggaactctttgatccggttcctgaacaggatctatttgaggcgctaaatgaaaccttaacgctatggaactcgccgcccgactgggctggcgatgagcgaaatgtagtgcttacgttgtcccgcatttggtacagcgcagtaaccggcaaaatcgcgccgaaggatgtcgctgccgactgggcaatggagcgcctgccggcccagtatcagcccgtcatacttgaagctaggcaggcttatcttggacaagaagatcgcttggcctcgcgcgcagatcagttggaagaatttgttcactacgtgaaaggcgagatcaccaaggtagtcggcaaataatcactagaccaatgttacacatatatactttagattgatttaaaacttcatttttaatttaaaaggatctaggtgaagatcctttttgataatctcatgaccaaaatcccttaacgtgagttttcgttccactgagcgtcagaccccgtagaaaagatcaaaggatcttcttgagatcctttttttctgcgcgtaatctgctgcttgcaaacaaaaaaaccaccgctaccagcggtggtttgtttgccggatcaagagctaccaactcttcttccgaaggtaactggcttcagcagagcgcagataccaaatactgttcttctagtgtagccgtagttaggccaccacttcaagaactctgtagcaccgcctacatacctcgctctgctaatcctgttaccagtggctgctgccagtggcgataagtcgtgtcttaccgggttggactcaagacgatagttaccggataaggcgcagcggtcgggctgaacggggggttcgtgcacacagcccagcttggagcgaacgacctacaccgaactgagatacctacagcgtgagctatgagaaagcgccacgcttcccgaagggagaaaggcggacaggtatccggtaagcggcagggtcggaacaggagagcgcacgagggagcttccagggggaaacgcctggtatctttatagtcctgtcgggtttcgccacctctgacttgagcgtcgatttttgtgatgctcgtcaggggggcggagcctatggaaaaacgccagcaacgcggcctttttacggttcctggccttttgctggccttttgctcacatgagatctcaaacaaacacatacagcgacttagtttacccgccaatatatcctgtcaaggctcgaactaggctcggacgaagtaagcggccgcaaccttaattaaacacggcgcgccaacagcgatcgcaccaggtacc

SEQ ID NO: 247 - DNA, 8038 bp, synthetic construct
  misc_feature 1..8038: note = pAGS-0010 CMV promoter + enhancer
  source 1..8038: mol_type = other DNA
acctcgttacataacttacggtaaatggcccgcctggctgaccgcccaacgacccccgcccattgacgtcaataatgacgtatgttcccatagtaacgccaatagggactttccattgacgtcaatgggtggagtatttacggtaaactgcccacttggcagtacatcaagtgtatcatatgccaagtacgccccctattgacgtcaatgacggtaaatggcccgcctggcattatgcccagtacatgaccttatgggactttcctacttggcagtacatctacgtattagtcatcgctattaccatggtgatgcggttttggcagtacatcaatgggcgtggatagcggtttgactcacggggatttccaagtctccaccccattgacgtcaatgggagtttgttttggcaccaaaatcaacgggactttccaaaatgtcgtaacaactccgccccattgacgcaaatgggcggtaggcgtgtacggtgggaggtctatataagcagagctaacagtattcagtcgactggtaccaacaggctatggaggacgccaagaacatcaagaagggccccgcccccttctaccccctggaggacggcaccgccggcgagcagctgcacaaggccatgaagcgctacgccctggtgcccggcaccatcgccttcaccgacgcccacatcgaggtggacatcacctacgccgagtacttcgagatgagcgtgcgcctggccgaggccatgaagcgctacggcctgaacaccaaccaccgcatcgtggtgtgcagcgagaacagcctgcagttcttcatgcccgtgctgggcgccctgttcatcggcgtggccgtggcccccgccaacgacatctacaacgagcgcgagctgctgaacagcatgggcatcagccagcccaccgtggtgttcgtgagcaagaagggcctgcagaagatcctgaacgtgcagaagaagctgcccatcatccagaagatcatcatcatggacagcaagaccgactaccagggcttccagagcatgtacaccttcgtgaccagccacctgccccccggcttcaacgagtacgacttcgtgcccgagagcttcgaccgcgacaagaccatcgccctgatcatgaacagcagcggcagcaccggcctgcccaagggcgtggccctgccccaccgcaccgcctgcgtgcgcttcagccacgcccgcgaccccatcttcggcaaccagatcatccccgacaccgccatcctgagcgtggtgcccttccaccacggcttcggcatgttcaccaccctgggctacctgatctgcggcttccgcgtggtgctgatgtaccgcttcgaggaggagctgttcctgcgcagcctgcaggactacaagatccagagcgccctgctggtgcccaccctgttcagcttcttcgccaagagcaccctgatcgacaagtacgacctgagcaacctgcacgagatcgccagcggcggcgcccccctgagcaaggaggtgggcgaggccgtggccaagcgcttccacctgcccggcatccgccagggctacggcctgaccgagaccaccagcgccatcctgatcacccccgagggcgacgacaagcccggcgccgtgggcaaggtggtgcccttcttcgaggccaaggtggtggacctggacaccggcaagaccctgggcgtgaaccagcgcggcgagctgtgcgtgcgcggccccatgatcatgagcggctacgtgaacaaccccgaggccaccaacgccctgatcgacaaggacggctggctgcacagcggcgacatcgcctactgggacgaggacgagcacttcttcatcgtggaccgcctgaagagcctgatcaagtacaagggctaccaggtggcccccgccgagctggagagcatcctgctgcagcaccccaacatcttcgacgccggcgtggccggcctgcccgacgacgacgccggcgagctgcccgccgccgtggtggtgctggagcacggcaagaccatgaccgagaaggagatcgtggactacgtggccagccaggtgaccaccgccaagaagctgcgcggcggcgtggtgttcgtggacgaggtgcccaagggcctgaccggcaagctggacgcccgcaagatccgcgagatcctgatcaaggccaagaagggcggcaagatcgccgtgtcaggtggatcctagataacctttaccttcattccctgtaaattggtaccctgcaaagctttcgttcgtatcatcggtttcgacaacgttcgtcaagttcaatgcatcagtttcattgcgcacacaccagaatcctactgagtttgagtattatggcattgggaaaactgtttttcttgtaccatttgttgtgcttgtaatttactgtgttttttattcggttttcgctatcgaactgtgaaatggaaatggatggagaagagttaatgaatgatatggtccttttgttcattctcaaattaatattatttgttttttctcttatttgttgtgtgttgaatttgaaattataagagatatgcaaacattttgttttgagtaaaaatgtgtcaaatcgtggcctctaatgaccgaagttaatatgaggagtaaaacacttgtagttgtaccattatgcttattcactaggcaacaaatatattttcagacctagaaaagctgcaaatgttactgaatacaagtatgtcctcttgtgttttagacatttatgaactttcctttatgtaattttccagaatccttgtcagattctaatcattgctttataattatagttatactcatggatttgtagttgagtatgaaaatattttttaatgcattttatgacttgccaattgattgacaacatgcatcaatcgactagtcgacgagtcagtaataaacggcgtcaaagtggttgcagccggcacacacgagtcgtgtttatcaactcaaagcacaaatacttttcctcaacctaaaaataaggcaattagccaaaaacaactttgcgtgtaaacaacgctcaatacacgtgtcattttattattagctattgcttcaccgccttagctttctcgtgacctagtcgtcctcgtcttttcttcttcttcttctataaaacaatacccaaagagctcttcttcttcacaattcagatttcaatttctcaaaatcttaaaaactttctctcaattctctctaccgtgatcaaggtaaatttctgtgttccttattctctcaaaatcttcgattttgttttcgttcgatcccaatttcgtatatgttctttggtttagattctgttaatcttagatcgaagacgattttctgggtttgatcgttagatatcatcttaattctcgattagggtttcatagatatcatccgatttgttcaaataatttgagttttgtcgaataattactcttcgatttgtgatttctatctagatctggtgttagtttctagtttgtgcgatcgaatttgtagattaatctgagtttttctgattaacaccacaccaatctggtaccagaaaaggggagaagcaaaaccatgggtaaaaagcctgaactcaccgcgacgtctgtcgagaagtttctgatcgaaaagttcgacagcgtctccgacctgatgcagctctcggagggcgaagaatctcgtgctttcagcttcgatgtaggagggcgtggatatgtcctgcgggtaaatagctgcgccgatggtttctacaaagatcgttatgtttatcggcactttgcatcggccgcgctcccgattccggaagtgcttgacattggggcattcagcgagagcctgacctattgcatctcccgccgtgcacagggtgtcacgttgcaagacctgcctgaaaccgaactgcccgctgttctgcaaccggtcgcggaggcgatggatgccatcgctgcggccgatcttagccagacgagcgggttcggcccattcggaccgcaaggaatcggtcaatacactacatggcgtgatttcatatgcgcgattgctgatccccatgtgtatcactggcaaactgtgatggacgacaccgtcagtgcgtccgtcgcgcaggctctcgatgagctgatgctttgggccgaggactgccccgaagtccggcacctcgtgcacgcggatttcggctccaacaatgtcctgacggacaatggccgcataacagcggtcattgactggagcgaggcgatgttcggggattcccaatacgaggtcgccaacatcttcttctggaggccgtggttggcttgtatggagcagcagacgcgctacttcgagcggaggcatccggagcttgcaggatcgccgcggctccgggcgtatatgctccgcattggtcttgaccaactctatcagagcttggttgacggcaatttcgatgatgcagcttgggcgcagggtcgatgcgacgcaatcgtccgatccggagccgggactgtcgggcgtacacaaatcgcccgcagaagcgcggccgtctggaccgatggctgtgtagaagtactcgccgatagtggaaaccgacgccccagcactcgtccgagggcaaaggaatagatgcatcctgctttaatgagatatgcgagacgcctatgatcgcatgatatttgctttcaattctgttgtgcacgttgtaaaaaacctgagcatgtgtagctcagatccttaccgccggtttcggttcattctaatgaatatatcacccgttactatcgtatttttatgaataatattctccgttcaatttactgattgtaccctactacttatatgtacaatattaaaatgaaaacaatatattgtgctgaataggtttatagcgacatctatgatagagcgccacaataacaaacaattgcgttttattattacaaatccaattttaaaaaaagcggcagaaccggtcaaacctaaaagactgattacataaatcttattcaaatttcaaaagtgccccaggggctagtatctacgacacaccgagcggcgaactaataacgctcactgaagggaactccggttccccgccggcgcgcatgggtgagattccttgaagttgagtattggccgtccgctctaccgaaagttacgggcaccattcaacccggtccagcacggcggccgggtaaccgacttgctgccccgagaattatgcagcatttttttggtgtatgtgggccccaaatgaagtgcaggtcaaaccttgacagtgacgacaaatcgttgggcgggtccagggcgaattttgcgacaacatgtcgaggctcagcaggaccggcatgcaagctagcttactagtgatattctatagtgtcacctaaatgtattctagaccaagcatgcacagctggcgttctcagccagatccaacgttacaccacaatatatcctgccaagatctaattccggggatcggaaatccagaagcccgagaggttgccgcctttcgggctttttctttttcaaaaaaaaaaatttataaaacgatctgttgcggccggccgccgggttgtgggcaaaggcgctcgacggtgggcaaccgcttgcggttgtccacgggcggagccggtgcgcgtagcgcattgtccacaagccaagggcgaccaataattgatatatatattcataattgaaaagctaattgaacatactacttgctgtaactacttgccggagcgaggggtgtttgcaagctgttgatctgaaagggctattagcgttctcacgtgcctttttgattagcgatttcacgtgaccttattagcgatttcacgtactccgattagcgatttcacgtaccctgattagcgatttcacgtggatagtttttggagcgggccggaaagccccgtgaatcaaggctttgcggggcattagcggtttcacgtggataactaccctctatccacaggcttccggggataaaaaagcccgctcgacggcgggctgttggatggggatcgcctgaatcgccccatcatccagccagaaagtgagggagccacggttgatgagagctttgttgtaggtggaccagttggtgattttgaacttttgctttgccacggaacggtctgcgttgtcgggaagatgcgtgatctgatccttcaactcagcaaaagttcgatttattcaacaaagccacgttgtgtctcaaaatctctgatgttacattgcacaagataaaaatatatcatcatgaacaataaaactgtctgcttacataaacagtaatacaaggggtgttatgagggaagcggtgatcgccgaagtatcgactcaactatcagaggtagttggcgtcatcgagcgccatctcgaaccgacgttgctggccgtacatttgtacggctccgcagtggatggcggcctgaagccacacagtgatattgatttgctggttacggtgaccgtaaggcttgatgaaacaacgcggcgagctttgatcaacgaccttttggaaacttcggcttcccctggagagagcgagattctccgcgctgtagaagtcaccattgttgtgcacgacgacatcattccgtggcgttatccagctaagcgcgaactgcaatttggagaatggcagcgcaatgacattcttgcaggtatcttcgagccagccacgatcgacattgatctggctatcttgctgacaaaagcaagagaacatagcgttgccttggtaggtccagcggcggaggaactctttgatccggttcctgaacaggatctatttgaggcgctaaatgaaaccttaacgctatggaactcgccgcccgactgggctggcgatgagcgaaatgtagtgcttacgttgtcccgcatttggtacagcgcagtaaccggcaaaatcgcgccgaaggatgtcgctgccgactgggcaatggagcgcctgccggcccagtatcagcccgtcatacttgaagctaggcaggcttatcttggacaagaagatcgcttggcctcgcgcgcagatcagttggaagaatttgttcactacgtgaaaggcgagatcaccaaggtagtcggcaaataatcactagaccaatgttacacatatatactttagattgatttaaaacttcatttttaatttaaaaggatctaggtgaagatcctttttgataatctcatgaccaaaatcccttaacgtgagttttcgttccactgagcgtcagaccccgtagaaaagatcaaaggatcttcttgagatcctttttttctgcgcgtaatctgctgcttgcaaacaaaaaaaccaccgctaccagcggtggtttgtttgccggatcaagagctaccaactcttcttccgaaggtaactggcttcagcagagcgcagataccaaatactgttcttctagtgtagccgtagttaggccaccacttcaagaactctgtagcaccgcctacatacctcgctctgctaatcctgttaccagtggctgctgccagtggcgataagtcgtgtcttaccgggttggactcaagacgatagttaccggataaggcgcagcggtcgggctgaacggggggttcgtgcacacagcccagcttggagcgaacgacctacaccgaactgagatacctacagcgtgagctatgagaaagcgccacgcttcccgaagggagaaaggcggacaggtatccggtaagcggcagggtcggaacaggagagcgcacgagggagcttccagggggaaacgcctggtatctttatagtcctgtcgggtttcgccacctctgacttgagcgtcgatttttgtgatgctcgtcaggggggcggagcctatggaaaaacgccagcaacgcggcctttttacggttcctggccttttgctggccttttgctcacatgagatctcaaacaaacacatacagcgacttagtttacccgccaatatatcctgtcaaggctcgaactaggctcggacgaagtaagcggccgcaaccttaattaaacacggcgcgccaacagcgatcgcaccaggtacc

SEQ ID NO: 248 - DNA, 7888 bp, synthetic construct
  misc_feature 1..7888: note = pAGS-0011 SV40 promoter
  source 1..7888: mol_type = other DNA
acctctgaggcggaaagaaccagctgtggaatgtgtgtcagttagggtgtggaaagtccccaggctccccagcaggcagaagtatgcaaagcatgcatctcaattagtcagcaaccaggtgtggaaagtccccaggctccccagcaggcagaagtatgcaaagcatgcatctcaattagtcagcaaccatagtcccgcccctaactccgcccatcccgcccctaactccgcccagttccgcccattctccgccccatggctgactaattttttttatttatgcagaggccgaggccgcctcggcctctgagctattccagaagtagtgaggaggcttttttggaggcctaggcttttgcaaaaacagtattcagtcgactggtaccaacaggctatggaggacgccaagaacatcaagaagggccccgcccccttctaccccctggaggacggcaccgccggcgagcagctgcacaaggccatgaagcgctacgccctggtgcccggcaccatcgccttcaccgacgcccacatcgaggtggacatcacctacgccgagtacttcgagatgagcgtgcgcctggccgaggccatgaagcgctacggcctgaacaccaaccaccgcatcgtggtgtgcagcgagaacagcctgcagttcttcatgcccgtgctgggcgccctgttcatcggcgtggccgtggcccccgccaacgacatctacaacgagcgcgagctgctgaacagcatgggcatcagccagcccaccgtggtgttcgtgagcaagaagggcctgcagaagatcctgaacgtgcagaagaagctgcccatcatccagaagatcatcatcatggacagcaagaccgactaccagggcttccagagcatgtacaccttcgtgaccagccacctgccccccggcttcaacgagtacgacttcgtgcccgagagcttcgaccgcgacaagaccatcgccctgatcatgaacagcagcggcagcaccggcctgcccaagggcgtggccctgccccaccgcaccgcctgcgtgcgcttcagccacgcccgcgaccccatcttcggcaaccagatcatccccgacaccgccatcctgagcgtggtgcccttccaccacggcttcggcatgttcaccaccctgggctacctgatctgcggcttccgcgtggtgctgatgtaccgcttcgaggaggagctgttcctgcgcagcctgcaggactacaagatccagagcgccctgctggtgcccaccctgttcagcttcttcgccaagagcaccctgatcgacaagtacgacctgagcaacctgcacgagatcgccagcggcggcgcccccctgagcaaggaggtgggcgaggccgtggccaagcgcttccacctgcccggcatccgccagggctacggcctgaccgagaccaccagcgccatcctgatcacccccgagggcgacgacaagcccggcgccgtgggcaaggtggtgcccttcttcgaggccaaggtggtggacctggacaccggcaagaccctgggcgtgaaccagcgcggcgagctgtgcgtgcgcggccccatgatcatgagcggctacgtgaacaaccccgaggccaccaacgccctgatcgacaaggacggctggctgcacagcggcgacatcgcctactgggacgaggacgagcacttcttcatcgtggaccgcctgaagagcctgatcaagtacaagggctaccaggtggcccccgccgagctggagagcatcctgctgcagcaccccaacatcttcgacgccggcgtggccggcctgcccgacgacgacgccggcgagctgcccgccgccgtggtggtgctggagcacggcaagaccatgaccgagaaggagatcgtggactacgtggccagccaggtgaccaccgccaagaagctgcgcggcggcgtggtgttcgtggacgaggtgcccaagggcctgaccggcaagctggacgcccgcaagatccgcgagatcctgatcaaggccaagaagggcggcaagatcgccgtgtcaggtggatcctagataacctttaccttcattccctgtaaattggtaccctgcaaagctttcgttcgtatcatcggtttcgacaacgttcgtcaagttcaatgcatcagtttcattgcgcacacaccagaatcctactgagtttgagtattatggcattgggaaaactgtttttcttgtaccatttgttgtgcttgtaatttactgtgttttttattcggttttcgctatcgaactgtgaaatggaaatggatggagaagagttaatgaatgatatggtccttttgttcattctcaaattaatattatttgttttttctcttatttgttgtgtgttgaatttgaaattataagagatatgcaaacattttgttttgagtaaaaatgtgtcaaatcgtggcctctaatgaccgaagttaatatgaggagtaaaacacttgtagttgtaccattatgcttattcactaggcaacaaatatattttcagacctagaaaagctgcaaatgttactgaatacaagtatgtcctcttgtgttttagacatttatgaactttcctttatgtaattttccagaatccttgtcagattctaatcattgctttataattatagttatactcatggatttgtagttgagtatgaaaatattttttaatgcattttatgacttgccaattgattgacaacatgcatcaatcgactagtcgacgagtcagtaataaacggcgtcaaagtggttgcagccggcacacacgagtcgtgtttatcaactcaaagcacaaatacttttcctcaacctaaaaataaggcaattagccaaaaacaactttgcgtgtaaacaacgctcaatacacgtgtcattttattattagctattgcttcaccgccttagctttctcgtgacctagtcgtcctcgtcttttcttcttcttcttctataaaacaatacccaaagagctcttcttcttcacaattcagatttcaatttctcaaaatcttaaaaactttctctcaattctctctaccgtgatcaaggtaaatttctgtgttccttattctctcaaaatcttcgattttgttttcgttcgatcccaatttcgtatatgttctttggtttagattctgttaatcttagatcgaagacgattttctgggtttgatcgttagatatcatcttaattctcgattagggtttcatagatatcatccgatttgttcaaataatttgagttttgtcgaataattactcttcgatttgtgatttctatctagatctggtgttagtttctagtttgtgcgatcgaatttgtagattaatctgagtttttctgattaacaccacaccaatctggtaccagaaaaggggagaagcaaaaccatgggtaaaaagcctgaactcaccgcgacgtctgtcgagaagtttctgatcgaaaagttcgacagcgtctccgacctgatgcagctctcggagggcgaagaatctcgtgctttcagcttcgatgtaggagggcgtggatatgtcctgcgggtaaatagctgcgccgatggtttctacaaagatcgttatgtttatcggcactttgcatcggccgcgctcccgattccggaagtgcttgacattggggcattcagcgagagcctgacctattgcatctcccgccgtgcacagggtgtcacgttgcaagacctgcctgaaaccgaactgcccgctgttctgcaaccggtcgcggaggcgatggatgccatcgctgcggccgatcttagccagacgagcgggttcggcccattcggaccgcaaggaatcggtcaatacactacatggcgtgatttcatatgcgcgattgctgatccccatgtgtatcactggcaaactgtgatggacgacaccgtcagtgcgtccgtcgcgcaggctctcgatgagctgatgctttgggccgaggactgccccgaagtccggcacctcgtgcacgcggatttcggctccaacaatgtcctgacggacaatggccgcataacagcggtcattgactggagcgaggcgatgttcggggattcccaatacgaggtcgccaacatcttcttctggaggccgtggttggcttgtatggagcagcagacgcgctacttcgagcggaggcatccggagcttgcaggatcgccgcggctccgggcgtatatgctccgcattggtcttgaccaactctatcagagcttggttgacggcaatttcgatgatgcagcttgggcgcagggtcgatgcgacgcaatcgtccgatccggagccgggactgtcgggcgtacacaaatcgcccgcagaagcgcggccgtctggaccgatggctgtgtagaagtactcgccgatagtggaaaccgacgccccagcactcgtccgagggcaaaggaatagatgcatcctgctttaatgagatatgcgagacgcctatgatcgcatgatatttgctttcaattctgttgtgcacgttgtaaaaaacctgagcatgtgtagctcagatccttaccgccggtttcggttcattctaatgaatatatcacccgttactatcgtatttttatgaataatattctccgttcaatttactgattgtaccctactacttatatgtacaatattaaaatgaaaacaatatattgtgctgaataggtttatagcgacatctatgatagagcgccacaataacaaacaattgcgttttattattacaaatccaattttaaaaaaagcggcagaaccggtcaaacctaaaagactgattacataaatcttattcaaatttcaaaagtgccccaggggctagtatctacgacacaccgagcggcgaactaataacgctcactgaagggaactccggttccccgccggcgcgcatgggtgagattccttgaagttgagtattggccgtccgctctaccgaaagttacgggcaccattcaacccggtccagcacggcggccgggtaaccgacttgctgccccgagaattatgcagcatttttttggtgtatgtgggccccaaatgaagtgcaggtcaaaccttgacagtgacgacaaatcgttgggcgggtccagggcgaattttgcgacaacatgtcgaggctcagcaggaccggcatgcaagctagcttactagtgatattctatagtgtcacctaaatgtattctagaccaagcatgcacagctggcgttctcagccagatccaacgttacaccacaatatatcctgccaagatctaattccggggatcggaaatccagaagcccgagaggttgccgcctttcgggctttttctttttcaaaaaaaaaaatttataaaacgatctgttgcggccggccgccgggttgtgggcaaaggcgctcgacggtgggcaaccgcttgcggttgtccacgggcggagccggtgcgcgtagcgcattgtccacaagccaagggcgaccaataattgatatatatattcataattgaaaagctaattgaacatactacttgctgtaactacttgccggagcgaggggtgtttgcaagctgttgatctgaaagggctattagcgttctcacgtgcctttttgattagcgatttcacgtgaccttattagcgatttcacgtactccgattagcgatttcacgtaccctgattagcgatttcacgtggatagtttttggagcgggccggaaagccccgtgaatcaaggctttgcggggcattagcggtttcacgtggataactaccctctatccacaggcttccggggataaaaaagcccgctcgacggcgggctgttggatggggatcgcctgaatcgccccatcatccagccagaaagtgagggagccacggttgatgagagctttgttgtaggtggaccagttggtgattttgaacttttgctttgccacggaacggtctgcgttgtcgggaagatgcgtgatctgatccttcaactcagcaaaagttcgatttattcaacaaagccacgttgtgtctcaaaatctctgatgttacattgcacaagataaaaatatatcatcatgaacaataaaactgtctgcttacataaacagtaatacaaggggtgttatgagggaagcggtgatcgccgaagtatcgactcaactatcagaggtagttggcgtcatcgagcgccatctcgaaccgacgttgctggccgtacatttgtacggctccgcagtggatggcggcctgaagccacacagtgatattgatttgctggttacggtgaccgtaaggcttgatgaaacaacgcggcgagctttgatcaacgaccttttggaaacttcggcttcccctggagagagcgagattctccgcgctgtagaagtcaccattgttgtgcacgacgacatcattccgtggcgttatccagctaagcgcgaactgcaatttggagaatggcagcgcaatgacattcttgcaggtatcttcgagccagccacgatcgacattgatctggctatcttgctgacaaaagcaagagaacatagcgttgccttggtaggtccagcggcggaggaactctttgatccggttcctgaacaggatctatttgaggcgctaaatgaaaccttaacgctatggaactcgccgcccgactgggctggcgatgagcgaaatgtagtgcttacgttgtcccgcatttggtacagcgcagtaaccggcaaaatcgcgccgaaggatgtcgctgccgactgggcaatggagcgcctgccggcccagtatcagcccgtcatacttgaagctaggcaggcttatcttggacaagaagatcgcttggcctcgcgcgcagatcagttggaagaatttgttcactacgtgaaaggcgagatcaccaaggtagtcggcaaataatcactagaccaatgttacacatatatactttagattgatttaaaacttcatttttaatttaaaaggatctaggtgaagatcctttttgataatctcatgaccaaaatcccttaacgtgagttttcgttccactgagcgtcagaccccgtagaaaagatcaaaggatcttcttgagatcctttttttctgcgcgtaatctgctgcttgcaaacaaaaaaaccaccgctaccagcggtggtttgtttgccggatcaagagctaccaactcttcttccgaaggtaactggcttcagcagagcgcagataccaaatactgttcttctagtgtagccgtagttaggccaccacttcaagaactctgtagcaccgcctacatacctcgctctgctaatcctgttaccagtggctgctgccagtggcgataagtcgtgtcttaccgggttggactcaagacgatagttaccggataaggcgcagcggtcgggctgaacggggggttcgtgcacacagcccagcttggagcgaacgacctacaccgaactgagatacctacagcgtgagctatgagaaagcgccacgcttcccgaagggagaaaggcggacaggtatccggtaagcggcagggtcggaacaggagagcgcacgagggagcttccagggggaaacgcctggtatctttatagtcctgtcgggtttcgccacctctgacttgagcgtcgatttttgtgatgctcgtcaggggggcggagcctatggaaaaacgccagcaacgcggcctttttacggttcctggccttttgctggccttttgctcacatgagatctcaaacaaacacatacagcgacttagtttacccgccaatatatcctgtcaaggctcgaactaggctcggacgaagtaagcggccgcaaccttaattaaacacggcgcgccaacagcgatcgcaccaggtacc

SEQ ID NO: 249 - DNA, 7994 bp, synthetic construct
  misc_feature 1..7994: note = pAGS-0012 SV40 promoter +enhancer
  source 1..7994: mol_type = other DNA
acctcgcggaacccctatttgtttatttttctaaatacattcaaatatgtatccgctcatgagacaataaccctgataaatgcttcaataatattgaaaaaggaagagtcctgaggcggaaagaaccagctgtggaatgtgtgtcagttagggtgtggaaagtccccaggctccccagcaggcagaagtatgcaaagcatgcatctcaattagtcagcaaccaggtgtggaaagtccccaggctccccagcaggcagaagtatgcaaagcatgcatctcaattagtcagcaaccatagtcccgcccctaactccgcccatcccgcccctaactccgcccagttccgcccattctccgccccatggctgactaattttttttatttatgcagaggccgaggccgcctcggcctctgagctattccagaagtagtgaggaggcttttttggaggcctaggcttttgcaaaaacagtattcagtcgactggtaccaacaggctatggaggacgccaagaacatcaagaagggccccgcccccttctaccccctggaggacggcaccgccggcgagcagctgcacaaggccatgaagcgctacgccctggtgcccggcaccatcgccttcaccgacgcccacatcgaggtggacatcacctacgccgagtacttcgagatgagcgtgcgcctggccgaggccatgaagcgctacggcctgaacaccaaccaccgcatcgtggtgtgcagcgagaacagcctgcagttcttcatgcccgtgctgggcgccctgttcatcggcgtggccgtggcccccgccaacgacatctacaacgagcgcgagctgctgaacagcatgggcatcagccagcccaccgtggtgttcgtgagcaagaagggcctgcagaagatcctgaacgtgcagaagaagctgcccatcatccagaagatcatcatcatggacagcaagaccgactaccagggcttccagagcatgtacaccttcgtgaccagccacctgccccccggcttcaacgagtacgacttcgtgcccgagagcttcgaccgcgacaagaccatcgccctgatcatgaacagcagcggcagcaccggcctgcccaagggcgtggccctgccccaccgcaccgcctgcgtgcgcttcagccacgcccgcgaccccatcttcggcaaccagatcatccccgacaccgccatcctgagcgtggtgcccttccaccacggcttcggcatgttcaccaccctgggctacctgatctgcggcttccgcgtggtgctgatgtaccgcttcgaggaggagctgttcctgcgcagcctgcaggactacaagatccagagcgccctgctggtgcccaccctgttcagcttcttcgccaagagcaccctgatcgacaagtacgacctgagcaacctgcacgagatcgccagcggcggcgcccccctgagcaaggaggtgggcgaggccgtggccaagcgcttccacctgcccggcatccgccagggctacggcctgaccgagaccaccagcgccatcctgatcacccccgagggcgacgacaagcccggcgccgtgggcaaggtggtgcccttcttcgaggccaaggtggtggacctggacaccggcaagaccctgggcgtgaaccagcgcggcgagctgtgcgtgcgcggccccatgatcatgagcggctacgtgaacaaccccgaggccaccaacgccctgatcgacaaggacggctggctgcacagcggcgacatcgcctactgggacgaggacgagcacttcttcatcgtggaccgcctgaagagcctgatcaagtacaagggctaccaggtggcccccgccgagctggagagcatcctgctgcagcaccccaacatcttcgacgccggcgtggccggcctgcccgacgacgacgccggcgagctgcccgccgccgtggtggtgctggagcacggcaagaccatgaccgagaaggagatcgtggactacgtggccagccaggtgaccaccgccaagaagctgcgcggcggcgtggtgttcgtggacgaggtgcccaagggcctgaccggcaagctggacgcccgcaagatccgcgagatcctgatcaaggccaagaagggcggcaagatcgccgtgtcaggtggatcctagataacctttaccttcattccctgtaaattggtaccctgcaaagctttcgttcgtatcatcggtttcgacaacgttcgtcaagttcaatgcatcagtttcattgcgcacacaccagaatcctactgagtttgagtattatggcattgggaaaactgtttttcttgtaccatttgttgtgcttgtaatttactgtgttttttattcggttttcgctatcgaactgtgaaatggaaatggatggagaagagttaatgaatgatatggtccttttgttcattctcaaattaatattatttgttttttctcttatttgttgtgtgttgaatttgaaattataagagatatgcaaacattttgttttgagtaaaaatgtgtcaaatcgtggcctctaatgaccgaagttaatatgaggagtaaaacacttgtagttgtaccattatgcttattcactaggcaacaaatatattttcagacctagaaaagctgcaaatgttactgaatacaagtatgtcctcttgtgttttagacatttatgaactttcctttatgtaattttccagaatccttgtcagattctaatcattgctttataattatagttatactcatggatttgtagttgagtatgaaaatattttttaatgcattttatgacttgccaattgattgacaacatgcatcaatcgactagtcgacgagtcagtaataaacggcgtcaaagtggttgcagccggcacacacgagtcgtgtttatcaactcaaagcacaaatacttttcctcaacctaaaaataaggcaattagccaaaaacaactttgcgtgtaaacaacgctcaatacacgtgtcattttattattagctattgcttcaccgccttagctttctcgtgacctagtcgtcctcgtcttttcttcttcttcttctataaaacaatacccaaagagctcttcttcttcacaattcagatttcaatttctcaaaatcttaaaaactttctctcaattctctctaccgtgatcaaggtaaatttctgtgttccttattctctcaaaatcttcgattttgttttcgttcgatcccaatttcgtatatgttctttggtttagattctgttaatcttagatcgaagacgattttctgggtttgatcgttagatatcatcttaattctcgattagggtttcatagatatcatccgatttgttcaaataatttgagttttgtcgaataattactcttcgatttgtgatttctatctagatctggtgttagtttctagtttgtgcgatcgaatttgtagattaatctgagtttttctgattaacaccacaccaatctggtaccagaaaaggggagaagcaaaaccatgggtaaaaagcctgaactcaccgcgacgtctgtcgagaagtttctgatcgaaaagttcgacagcgtctccgacctgatgcagctctcggagggcgaagaatctcgtgctttcagcttcgatgtaggagggcgtggatatgtcctgcgggtaaatagctgcgccgatggtttctacaaagatcgttatgtttatcggcactttgcatcggccgcgctcccgattccggaagtgcttgacattggggcattcagcgagagcctgacctattgcatctcccgccgtgcacagggtgtcacgttgcaagacctgcctgaaaccgaactgcccgctgttctgcaaccggtcgcggaggcgatggatgccatcgctgcggccgatcttagccagacgagcgggttcggcccattcggaccgcaaggaatcggtcaatacactacatggcgtgatttcatatgcgcgattgctgatccccatgtgtatcactggcaaactgtgatggacgacaccgtcagtgcgtccgtcgcgcaggctctcgatgagctgatgctttgggccgaggactgccccgaagtccggcacctcgtgcacgcggatttcggctccaacaatgtcctgacggacaatggccgcataacagcggtcattgactggagcgaggcgatgttcggggattcccaatacgaggtcgccaacatcttcttctggaggccgtggttggcttgtatggagcagcagacgcgctacttcgagcggaggcatccggagcttgcaggatcgccgcggctccgggcgtatatgctccgcattggtcttgaccaactctatcagagcttggttgacggcaatttcgatgatgcagcttgggcgcagggtcgatgcgacgcaatcgtccgatccggagccgggactgtcgggcgtacacaaatcgcccgcagaagcgcggccgtctggaccgatggctgtgtagaagtactcgccgatagtggaaaccgacgccccagcactcgtccgagggcaaaggaatagatgcatcctgctttaatgagatatgcgagacgcctatgatcgcatgatatttgctttcaattctgttgtgcacgttgtaaaaaacctgagcatgtgtagctcagatccttaccgccggtttcggttcattctaatgaatatatcacccgttactatcgtatttttatgaataatattctccgttcaatttactgattgtaccctactacttatatgtacaatattaaaatgaaaacaatatattgtgctgaataggtttatagcgacatctatgatagagcgccacaataacaaacaattgcgttttattattacaaatccaattttaaaaaaagcggcagaaccggtcaaacctaaaagactgattacataaatcttattcaaatttcaaaagtgccccaggggctagtatctacgacacaccgagcggcgaactaataacgctcactgaagggaactccggttccccgccggcgcgcatgggtgagattccttgaagttgagtattggccgtccgctctaccgaaagttacgggcaccattcaacccggtccagcacggcggccgggtaaccgacttgctgccccgagaattatgcagcatttttttggtgtatgtgggccccaaatgaagtgcaggtcaaaccttgacagtgacgacaaatcgttgggcgggtccagggcgaattttgcgacaacatgtcgaggctcagcaggaccggcatgcaagctagcttactagtgatattctatagtgtcacctaaatgtattctagaccaagcatgcacagctggcgttctcagccagatccaacgttacaccacaatatatcctgccaagatctaattccggggatcggaaatccagaagcccgagaggttgccgcctttcgggctttttctttttcaaaaaaaaaaatttataaaacgatctgttgcggccggccgccgggttgtgggcaaaggcgctcgacggtgggcaaccgcttgcggttgtccacgggcggagccggtgcgcgtagcgcattgtccacaagccaagggcgaccaataattgatatatatattcataattgaaaagctaattgaacatactacttgctgtaactacttgccggagcgaggggtgtttgcaagctgttgatctgaaagggctattagcgttctcacgtgcctttttgattagcgatttcacgtgaccttattagcgatttcacgtactccgattagcgatttcacgtaccctgattagcgatttcacgtggatagtttttggagcgggccggaaagccccgtgaatcaaggctttgcggggcattagcggtttcacgtggataactaccctctatccacaggcttccggggataaaaaagcccgctcgacggcgggctgttggatggggatcgcctgaatcgccccatcatccagccagaaagtgagggagccacggttgatgagagctttgttgtaggtggaccagttggtgattttgaacttttgctttgccacggaacggtctgcgttgtcgggaagatgcgtgatctgatccttcaactcagcaaaagttcgatttattcaacaaagccacgttgtgtctcaaaatctctgatgttacattgcacaagataaaaatatatcatcatgaacaataaaactgtctgcttacataaacagtaatacaaggggtgttatgagggaagcggtgatcgccgaagtatcgactcaactatcagaggtagttggcgtcatcgagcgccatctcgaaccgacgttgctggccgtacatttgtacggctccgcagtggatggcggcctgaagccacacagtgatattgatttgctggttacggtgaccgtaaggcttgatgaaacaacgcggcgagctttgatcaacgaccttttggaaacttcggcttcccctggagagagcgagattctccgcgctgtagaagtcaccattgttgtgcacgacgacatcattccgtggcgttatccagctaagcgcgaactgcaatttggagaatggcagcgcaatgacattcttgcaggtatcttcgagccagccacgatcgacattgatctggctatcttgctgacaaaagcaagagaacatagcgttgccttggtaggtccagcggcggaggaactctttgatccggttcctgaacaggatctatttgaggcgctaaatgaaaccttaacgctatggaactcgccgcccgactgggctggcgatgagcgaaatgtagtgcttacgttgtcccgcatttggtacagcgcagtaaccggcaaaatcgcgccgaaggatgtcgctgccgactgggcaatggagcgcctgccggcccagtatcagcccgtcatacttgaagctaggcaggcttatcttggacaagaagatcgcttggcctcgcgcgcagatcagttggaagaatttgttcactacgtgaaaggcgagatcaccaaggtagtcggcaaataatcactagaccaatgttacacatatatactttagattgatttaaaacttcatttttaatttaaaaggatctaggtgaagatcctttttgataatctcatgaccaaaatcccttaacgtgagttttcgttccactgagcgtcagaccccgtagaaaagatcaaaggatcttcttgagatcctttttttctgcgcgtaatctgctgcttgcaaacaaaaaaaccaccgctaccagcggtggtttgtttgccggatcaagagctaccaactcttcttccgaaggtaactggcttcagcagagcgcagataccaaatactgttcttctagtgtagccgtagttaggccaccacttcaagaactctgtagcaccgcctacatacctcgctctgctaatcctgttaccagtggctgctgccagtggcgataagtcgtgtcttaccgggttggactcaagacgatagttaccggataaggcgcagcggtcgggctgaacggggggttcgtgcacacagcccagcttggagcgaacgacctacaccgaactgagatacctacagcgtgagctatgagaaagcgccacgcttcccgaagggagaaaggcggacaggtatccggtaagcggcagggtcggaacaggagagcgcacgagggagcttccagggggaaacgcctggtatctttatagtcctgtcgggtttcgccacctctgacttgagcgtcgatttttgtgatgctcgtcaggggggcggagcctatggaaaaacgccagcaacgcggcctttttacggttcctggccttttgctggccttttgctcacatgagatctcaaacaaacacatacagcgacttagtttacccgccaatatatcctgtcaaggctcgaactaggctcggacgaagtaagcggccgcaaccttaattaaacacggcgcgccaacagcgatcgcaccaggtacc

SEQ ID NO: 250 - DNA, 4252 bp, synthetic construct
  misc_feature 1..4252: note = pAGS-0013 EF2 promoter
  source 1..4252: mol_type = other DNA
accttccattttgacatgtttcctagctagaaggaacagctattcatatgaattttccgaggtcacgctgtgatggatcgattcgttcccgtcacagacgcaagcagcgaggtgatggctggacgggcacgcgtcacaatttagaacaacccggactcttgtgacgcgagctccgggtgcggaaaaccctacggggtgaaaggagccgcagcttccacccatttacttgactgataacccagtacacacaacgctaccgtgacggaaatgccgcgcgctgtgaagccgtggtgaatctttcgctgctgctcgttctctccacacacacaacagtattcagtcgactggtaccaacaggctatggtgagcaagggcgaggagctgttcaccggcgtggtgcccatcctggtggagctggacggcgacgtgaacggccacaagttcagcgtgagcggcgagggcgagggcgacgccacctacggcaagctgaccctgaagttcatctgcaccaccggcaagctgcccgtgccctggcccaccctggtgaccaccctgacctacggcgtgcagtgcttcagccgctaccccgaccacatgaagcagcacgacttcttcaagagcgccatgcccgagggctacgtgcaggagcgcaccatcttcttcaaggacgacggcaactacaagacccgcgccgaggtgaagttcgagggcgacaccctggtgaaccgcatcgagctgaagggcatcgacttcaaggaggacggcaacatcctgggccacaagctggagtacaactacaacagccacaacgtgtacatcatggccgacaagcagaagaacggcatcaaggtgaacttcaagatccgccacaacatcgaggacggcagcgtgcagctggccgaccactaccagcagaacacccccatcggcgacggccccgtgctgctgcccgacaaccactacctgagcacccagagcgccctgagcaaggaccccaacgagaagcgcgaccacatggtgctgctggagttcgtgaccgccgccggcatcaccctgggcatggacgagctgtacaagtcaggtggatcctagataacctttaccttcattccctgtaaattggtaccctgcaaagctttcgttcgtatcatcggtttcgacaacgttcgtcaagttcaatgcatcagtttcattgcgcacacaccagaatcctactgagtttgagtattatggcattgggaaaactgtttttcttgtaccatttgttgtgcttgtaatttactgtgttttttattcggttttcgctatcgaactgtgaaatggaaatggatggagaagagttaatgaatgatatggtccttttgttcattctcaaattaatattatttgttttttctcttatttgttgtgtgttgaatttgaaattataagagatatgcaaacattttgttttgagtaaaaatgtgtcaaatcgtggcctctaatgaccgaagttaatatgaggagtaaaacacttgtagttgtaccattatgcttattcactaggcaacaaatatattttcagacctagaaaagctgcaaatgttactgaatacaagtatgtcctcttgtgttttagacatttatgaactttcctttatgtaattttccagaatccttgtcagattctaatcattgctttataattatagttatactcatggatttgtagttgagtatgaaaatattttttaatgcattttatgacttgccaattgattgacaacatgcatcaatcgactagtcgacgagtcagtaataaacggcgtcaaagtggttgcagccggcacacacgagtcgtgtttatcaactcaaagcacaaatacttttcctcaacctaaaaataaggcaattagccaaaaacaactttgcgtgtaaacaacgctcaatacacgtgtcattttattattagctattgcttcaccgccttagctttctcgtgacctagtcgtcctcgtcttttcttcttcttcttctataaaacaatacccaaagagctcttcttcttcacaattcagatttcaatttctcaaaatcttaaaaactttctctcaattctctctaccgtgatcaaggtaaatttctgtgttccttattctctcaaaatcttcgattttgttttcgttcgatcccaatttcgtatatgttctttggtttagattctgttaatcttagatcgaagacgattttctgggtttgatcgttagatatcatcttaattctcgattagggtttcatagatatcatccgatttgttcaaataatttgagttttgtcgaataattactcttcgatttgtgatttctatctagatctggtgttagtttctagtttgtgcgatcgaatttgtagattaatctgagtttttctgattaacaccacaccaatctggtaccagaaaaggggagaagcaaaaccatgggtaaaaagcctgaactcaccgcgacgtctgtcgagaagtttctgatcgaaaagttcgacagcgtctccgacctgatgcagctctcggagggcgaagaatctcgtgctttcagcttcgatgtaggagggcgtggatatgtcctgcgggtaaatagctgcgccgatggtttctacaaagatcgttatgtttatcggcactttgcatcggccgcgctcccgattccggaagtgcttgacattggggcattcagcgagagcctgacctattgcatctcccgccgtgcacagggtgtcacgttgcaagacctgcctgaaaccgaactgcccgctgttctgcaaccggtcgcggaggcgatggatgccatcgctgcggccgatcttagccagacgagcgggttcggcccattcggaccgcaaggaatcggtcaatacactacatggcgtgatttcatatgcgcgattgctgatccccatgtgtatcactggcaaactgtgatggacgacaccgtcagtgcgtccgtcgcgcaggctctcgatgagctgatgctttgggccgaggactgccccgaagtccggcacctcgtgcacgcggatttcggctccaacaatgtcctgacggacaatggccgcataacagcggtcattgactggagcgaggcgatgttcggggattcccaatacgaggtcgccaacatcttcttctggaggccgtggttggcttgtatggagcagcagacgcgctacttcgagcggaggcatccggagcttgcaggatcgccgcggctccgggcgtatatgctccgcattggtcttgaccaactctatcagagcttggttgacggcaatttcgatgatgcagcttgggcgcagggtcgatgcgacgcaatcgtccgatccggagccgggactgtcgggcgtacacaaatcgcccgcagaagcgcggccgtctggaccgatggctgtgtagaagtactcgccgatagtggaaaccgacgccccagcactcgtccgagggcaaaggaatagatgcatcctgctttaatgagatatgcgagacgcctatgatcgcatgatatttgctttcaattctgttgtgcacgttgtaaaaaacctgagcatgtgtagctcagatccttaccgccggtttcggttcattctaatgaatatatcacccgttactatcgtatttttatgaataatattctccgttcaatttactgattgtaccctactacttatatgtacaatattaaaatgaaaacaatatattgtgctgaataggtttatagcgacatctatgatagagcgccacaataacaaacaattgcgttttattattacaaatccaattttaaaaaaagcggcagaaccggtcaaacctaaaagactgattacataaatcttattcaaatttcaaaagtgccccaggggctagtatctacgacacaccgagcggcgaactaataacgctcactgaagggaactccggttccccgccggcgcgcatgggtgagattccttgaagttgagtattggccgtccgctctaccgaaagttacgggcaccattcaacccggtccagcacggcggccgggtaaccgacttgctgccccgagaattatgcagcatttttttggtgtatgtgggccccaaatgaagtgcaggtcaaaccttgacagtgacgacaaatcgttgggcgggtccagggcgaattttgcgacaacatgtcgaggctcagcaggaccggcatgcaagctagcttactagtgatattctatagtgtcacctaaat

SEQ ID NO: 251 - DNA, 4578 bp, synthetic construct
  misc_feature 1..4578: note = pAGS-0014 Histone 4 promoter
  source 1..4578: mol_type = other DNA
acctgcaatctcacgcaccaggcgctggaagggcaacttgcggatgagaaggtccgtggacttctggtaacgacggatctcacgcagagcgacggttccagggcgataacggtggggcttcttgactcctccggtagccggagcggacttacgggcagccttggtggcaagctgcttgcgcggcgctttgcctccggtggatttacgggcggtttgcttggttcgggccattttgacggttttttttacaagagaagagttcttgaaatttgtgaggttaaagtgtgtggcttccgccgtagtcaaggagcgtgcggttgccgatcgcaccggtacgttctgtagaaatgaacacagtgtgttgaattgaaagtatggcgcaggtatggtgtgtgataagtagcagccgcgccgagacaaacaaactttggtttctacgacaatctctgtagacaagtactagaaacccgtttgaacgagcataaatctgcaccggcaggccaccagacatcgtttcaacgtaatattctacgtaaccattttatcccaggaaacctacggcctgtgaaccactgaaaggaagcactcacaattcgctctcggcaacaaccgacaatagtcttactcacagtcaataccgaaaacaaacaacagaacagtattcagtcgactggtaccaacaggctatggtgagcaagggcgaggagctgttcaccggcgtggtgcccatcctggtggagctggacggcgacgtgaacggccacaagttcagcgtgagcggcgagggcgagggcgacgccacctacggcaagctgaccctgaagttcatctgcaccaccggcaagctgcccgtgccctggcccaccctggtgaccaccctgacctacggcgtgcagtgcttcagccgctaccccgaccacatgaagcagcacgacttcttcaagagcgccatgcccgagggctacgtgcaggagcgcaccatcttcttcaaggacgacggcaactacaagacccgcgccgaggtgaagttcgagggcgacaccctggtgaaccgcatcgagctgaagggcatcgacttcaaggaggacggcaacatcctgggccacaagctggagtacaactacaacagccacaacgtgtacatcatggccgacaagcagaagaacggcatcaaggtgaacttcaagatccgccacaacatcgaggacggcagcgtgcagctggccgaccactaccagcagaacacccccatcggcgacggccccgtgctgctgcccgacaaccactacctgagcacccagagcgccctgagcaaggaccccaacgagaagcgcgaccacatggtgctgctggagttcgtgaccgccgccggcatcaccctgggcatggacgagctgtacaagtcaggtggatcctagataacctttaccttcattccctgtaaattggtaccctgcaaagctttcgttcgtatcatcggtttcgacaacgttcgtcaagttcaatgcatcagtttcattgcgcacacaccagaatcctactgagtttgagtattatggcattgggaaaactgtttttcttgtaccatttgttgtgcttgtaatttactgtgttttttattcggttttcgctatcgaactgtgaaatggaaatggatggagaagagttaatgaatgatatggtccttttgttcattctcaaattaatattatttgttttttctcttatttgttgtgtgttgaatttgaaattataagagatatgcaaacattttgttttgagtaaaaatgtgtcaaatcgtggcctctaatgaccgaagttaatatgaggagtaaaacacttgtagttgtaccattatgcttattcactaggcaacaaatatattttcagacctagaaaagctgcaaatgttactgaatacaagtatgtcctcttgtgttttagacatttatgaactttcctttatgtaattttccagaatccttgtcagattctaatcattgctttataattatagttatactcatggatttgtagttgagtatgaaaatattttttaatgcattttatgacttgccaattgattgacaacatgcatcaatcgactagtcgacgagtcagtaataaacggcgtcaaagtggttgcagccggcacacacgagtcgtgtttatcaactcaaagcacaaatacttttcctcaacctaaaaataaggcaattagccaaaaacaactttgcgtgtaaacaacgctcaatacacgtgtcattttattattagctattgcttcaccgccttagctttctcgtgacctagtcgtcctcgtcttttcttcttcttcttctataaaacaatacccaaagagctcttcttcttcacaattcagatttcaatttctcaaaatcttaaaaactttctctcaattctctctaccgtgatcaaggtaaatttctgtgttccttattctctcaaaatcttcgattttgttttcgttcgatcccaatttcgtatatgttctttggtttagattctgttaatcttagatcgaagacgattttctgggtttgatcgttagatatcatcttaattctcgattagggtttcatagatatcatccgatttgttcaaataatttgagttttgtcgaataattactcttcgatttgtgatttctatctagatctggtgttagtttctagtttgtgcgatcgaatttgtagattaatctgagtttttctgattaacaccacaccaatctggtaccagaaaaggggagaagcaaaaccatgggtaaaaagcctgaactcaccgcgacgtctgtcgagaagtttctgatcgaaaagttcgacagcgtctccgacctgatgcagctctcggagggcgaagaatctcgtgctttcagcttcgatgtaggagggcgtggatatgtcctgcgggtaaatagctgcgccgatggtttctacaaagatcgttatgtttatcggcactttgcatcggccgcgctcccgattccggaagtgcttgacattggggcattcagcgagagcctgacctattgcatctcccgccgtgcacagggtgtcacgttgcaagacctgcctgaaaccgaactgcccgctgttctgcaaccggtcgcggaggcgatggatgccatcgctgcggccgatcttagccagacgagcgggttcggcccattcggaccgcaaggaatcggtcaatacactacatggcgtgatttcatatgcgcgattgctgatccccatgtgtatcactggcaaactgtgatggacgacaccgtcagtgcgtccgtcgcgcaggctctcgatgagctgatgctttgggccgaggactgccccgaagtccggcacctcgtgcacgcggatttcggctccaacaatgtcctgacggacaatggccgcataacagcggtcattgactggagcgaggcgatgttcggggattcccaatacgaggtcgccaacatcttcttctggaggccgtggttggcttgtatggagcagcagacgcgctacttcgagcggaggcatccggagcttgcaggatcgccgcggctccgggcgtatatgctccgcattggtcttgaccaactctatcagagcttggttgacggcaatttcgatgatgcagcttgggcgcagggtcgatgcgacgcaatcgtccgatccggagccgggactgtcgggcgtacacaaatcgcccgcagaagcgcggccgtctggaccgatggctgtgtagaagtactcgccgatagtggaaaccgacgccccagcactcgtccgagggcaaaggaatagatgcatcctgctttaatgagatatgcgagacgcctatgatcgcatgatatttgctttcaattctgttgtgcacgttgtaaaaaacctgagcatgtgtagctcagatccttaccgccggtttcggttcattctaatgaatatatcacccgttactatcgtatttttatgaataatattctccgttcaatttactgattgtaccctactacttatatgtacaatattaaaatgaaaacaatatattgtgctgaataggtttatagcgacatctatgatagagcgccacaataacaaacaattgcgttttattattacaaatccaattttaaaaaaagcggcagaaccggtcaaacctaaaagactgattacataaatcttattcaaatttcaaaagtgccccaggggctagtatctacgacacaccgagcggcgaactaataacgctcactgaagggaactccggttccccgccggcgcgcatgggtgagattccttgaagttgagtattggccgtccgctctaccgaaagttacgggcaccattcaacccggtccagcacggcggccgggtaaccgacttgctgccccgagaattatgcagcatttttttggtgtatgtgggccccaaatgaagtgcaggtcaaaccttgacagtgacgacaaatcgttgggcgggtccagggcgaattttgcgacaacatgtcgaggctcagcaggaccggcatgcaagctagcttactagtgatattctatagtgtcacctaaat

SEQ ID NO: 252 - DNA, 4068 bp, synthetic construct
  misc_feature 1..4068: note = pAGS-0015 Lhcf.1 promoter
  source 1..4068: mol_type = other DNA
acctgctgcaggacgcaatggaggattatcaccgcaaaaatgaacttcgaaaaaaactttcgagcgaccatggaaaaggaggatcagattcagattacaacagtggattgctctggtagcaaatatcttctgctagattggctcaacagtattcagtcgactggtaccaacaggctatggtgagcaagggcgaggagctgttcaccggcgtggtgcccatcctggtggagctggacggcgacgtgaacggccacaagttcagcgtgagcggcgagggcgagggcgacgccacctacggcaagctgaccctgaagttcatctgcaccaccggcaagctgcccgtgccctggcccaccctggtgaccaccctgacctacggcgtgcagtgcttcagccgctaccccgaccacatgaagcagcacgacttcttcaagagcgccatgcccgagggctacgtgcaggagcgcaccatcttcttcaaggacgacggcaactacaagacccgcgccgaggtgaagttcgagggcgacaccctggtgaaccgcatcgagctgaagggcatcgacttcaaggaggacggcaacatcctgggccacaagctggagtacaactacaacagccacaacgtgtacatcatggccgacaagcagaagaacggcatcaaggtgaacttcaagatccgccacaacatcgaggacggcagcgtgcagctggccgaccactaccagcagaacacccccatcggcgacggccccgtgctgctgcccgacaaccactacctgagcacccagagcgccctgagcaaggaccccaacgagaagcgcgaccacatggtgctgctggagttcgtgaccgccgccggcatcaccctgggcatggacgagctgtacaagtcaggtggatcctagataacctttaccttcattccctgtaaattggtaccctgcaaagctttcgttcgtatcatcggtttcgacaacgttcgtcaagttcaatgcatcagtttcattgcgcacacaccagaatcctactgagtttgagtattatggcattgggaaaactgtttttcttgtaccatttgttgtgcttgtaatttactgtgttttttattcggttttcgctatcgaactgtgaaatggaaatggatggagaagagttaatgaatgatatggtccttttgttcattctcaaattaatattatttgttttttctcttatttgttgtgtgttgaatttgaaattataagagatatgcaaacattttgttttgagtaaaaatgtgtcaaatcgtggcctctaatgaccgaagttaatatgaggagtaaaacacttgtagttgtaccattatgcttattcactaggcaacaaatatattttcagacctagaaaagctgcaaatgttactgaatacaagtatgtcctcttgtgttttagacatttatgaactttcctttatgtaattttccagaatccttgtcagattctaatcattgctttataattatagttatactcatggatttgtagttgagtatgaaaatattttttaatgcattttatgacttgccaattgattgacaacatgcatcaatcgactagtcgacgagtcagtaataaacggcgtcaaagtggttgcagccggcacacacgagtcgtgtttatcaactcaaagcacaaatacttttcctcaacctaaaaataaggcaattagccaaaaacaactttgcgtgtaaacaacgctcaatacacgtgtcattttattattagctattgcttcaccgccttagctttctcgtgacctagtcgtcctcgtcttttcttcttcttcttctataaaacaatacccaaagagctcttcttcttcacaattcagatttcaatttctcaaaatcttaaaaactttctctcaattctctctaccgtgatcaaggtaaatttctgtgttccttattctctcaaaatcttcgattttgttttcgttcgatcccaatttcgtatatgttctttggtttagattctgttaatcttagatcgaagacgattttctgggtttgatcgttagatatcatcttaattctcgattagggtttcatagatatcatccgatttgttcaaataatttgagttttgtcgaataattactcttcgatttgtgatttctatctagatctggtgttagtttctagtttgtgcgatcgaatttgtagattaatctgagtttttctgattaacaccacaccaatctggtaccagaaaaggggagaagcaaaaccatgggtaaaaagcctgaactcaccgcgacgtctgtcgagaagtttctgatcgaaaagttcgacagcgtctccgacctgatgcagctctcggagggcgaagaatctcgtgctttcagcttcgatgtaggagggcgtggatatgtcctgcgggtaaatagctgcgccgatggtttctacaaagatcgttatgtttatcggcactttgcatcggccgcgctcccgattccggaagtgcttgacattggggcattcagcgagagcctgacctattgcatctcccgccgtgcacagggtgtcacgttgcaagacctgcctgaaaccgaactgcccgctgttctgcaaccggtcgcggaggcgatggatgccatcgctgcggccgatcttagccagacgagcgggttcggcccattcggaccgcaaggaatcggtcaatacactacatggcgtgatttcatatgcgcgattgctgatccccatgtgtatcactggcaaactgtgatggacgacaccgtcagtgcgtccgtcgcgcaggctctcgatgagctgatgctttgggccgaggactgccccgaagtccggcacctcgtgcacgcggatttcggctccaacaatgtcctgacggacaatggccgcataacagcggtcattgactggagcgaggcgatgttcggggattcccaatacgaggtcgccaacatcttcttctggaggccgtggttggcttgtatggagcagcagacgcgctacttcgagcggaggcatccggagcttgcaggatcgccgcggctccgggcgtatatgctccgcattggtcttgaccaactctatcagagcttggttgacggcaatttcgatgatgcagcttgggcgcagggtcgatgcgacgcaatcgtccgatccggagccgggactgtcgggcgtacacaaatcgcccgcagaagcgcggccgtctggaccgatggctgtgtagaagtactcgccgatagtggaaaccgacgccccagcactcgtccgagggcaaaggaatagatgcatcctgctttaatgagatatgcgagacgcctatgatcgcatgatatttgctttcaattctgttgtgcacgttgtaaaaaacctgagcatgtgtagctcagatccttaccgccggtttcggttcattctaatgaatatatcacccgttactatcgtatttttatgaataatattctccgttcaatttactgattgtaccctactacttatatgtacaatattaaaatgaaaacaatatattgtgctgaataggtttatagcgacatctatgatagagcgccacaataacaaacaattgcgttttattattacaaatccaattttaaaaaaagcggcagaaccggtcaaacctaaaagactgattacataaatcttattcaaatttcaaaagtgccccaggggctagtatctacgacacaccgagcggcgaactaataacgctcactgaagggaactccggttccccgccggcgcgcatgggtgagattccttgaagttgagtattggccgtccgctctaccgaaagttacgggcaccattcaacccggtccagcacggcggccgggtaaccgacttgctgccccgagaattatgcagcatttttttggtgtatgtgggccccaaatgaagtgcaggtcaaaccttgacagtgacgacaaatcgttgggcgggtccagggcgaattttgcgacaacatgtcgaggctcagcaggaccggcatgcaagctagcttactagtgatattctatagtgtcacctaaat

SEQ ID NO: 253 - DNA, 4191 bp, synthetic construct
  misc_feature 1..4191: note = pAGS-0016 Ubi.U4 promoter
  source 1..4191: mol_type = other DNA
acctactacgttagagcgctaacgagaatacttcatataccgtattttttacgataataataatgtaatgtgaaattgctatccaaaaggcacctaattttgtccaccgttcaaaggaaaggacaaggaagtagtagcgtgtaggtttggtgctgtacaaaataagcaagacacgtgttgccttattataggataatccataaggcaatttcgtcttaagtcggccattgcacctttaaaaggagcctctttgttcccaaaatcttcaacagtattcagtcgactggtaccaacaggctatggtgagcaagggcgaggagctgttcaccggcgtggtgcccatcctggtggagctggacggcgacgtgaacggccacaagttcagcgtgagcggcgagggcgagggcgacgccacctacggcaagctgaccctgaagttcatctgcaccaccggcaagctgcccgtgccctggcccaccctggtgaccaccctgacctacggcgtgcagtgcttcagccgctaccccgaccacatgaagcagcacgacttcttcaagagcgccatgcccgagggctacgtgcaggagcgcaccatcttcttcaaggacgacggcaactacaagacccgcgccgaggtgaagttcgagggcgacaccctggtgaaccgcatcgagctgaagggcatcgacttcaaggaggacggcaacatcctgggccacaagctggagtacaactacaacagccacaacgtgtacatcatggccgacaagcagaagaacggcatcaaggtgaacttcaagatccgccacaacatcgaggacggcagcgtgcagctggccgaccactaccagcagaacacccccatcggcgacggccccgtgctgctgcccgacaaccactacctgagcacccagagcgccctgagcaaggaccccaacgagaagcgcgaccacatggtgctgctggagttcgtgaccgccgccggcatcaccctgggcatggacgagctgtacaagtcaggtggatcctagataacctttaccttcattccctgtaaattggtaccctgcaaagctttcgttcgtatcatcggtttcgacaacgttcgtcaagttcaatgcatcagtttcattgcgcacacaccagaatcctactgagtttgagtattatggcattgggaaaactgtttttcttgtaccatttgttgtgcttgtaatttactgtgttttttattcggttttcgctatcgaactgtgaaatggaaatggatggagaagagttaatgaatgatatggtccttttgttcattctcaaattaatattatttgttttttctcttatttgttgtgtgttgaatttgaaattataagagatatgcaaacattttgttttgagtaaaaatgtgtcaaatcgtggcctctaatgaccgaagttaatatgaggagtaaaacacttgtagttgtaccattatgcttattcactaggcaacaaatatattttcagacctagaaaagctgcaaatgttactgaatacaagtatgtcctcttgtgttttagacatttatgaactttcctttatgtaattttccagaatccttgtcagattctaatcattgctttataattatagttatactcatggatttgtagttgagtatgaaaatattttttaatgcattttatgacttgccaattgattgacaacatgcatcaatcgactagtcgacgagtcagtaataaacggcgtcaaagtggttgcagccggcacacacgagtcgtgtttatcaactcaaagcacaaatacttttcctcaacctaaaaataaggcaattagccaaaaacaactttgcgtgtaaacaacgctcaatacacgtgtcattttattattagctattgcttcaccgccttagctttctcgtgacctagtcgtcctcgtcttttcttcttcttcttctataaaacaatacccaaagagctcttcttcttcacaattcagatttcaatttctcaaaatcttaaaaactttctctcaattctctctaccgtgatcaaggtaaatttctgtgttccttattctctcaaaatcttcgattttgttttcgttcgatcccaatttcgtatatgttctttggtttagattctgttaatcttagatcgaagacgattttctgggtttgatcgttagatatcatcttaattctcgattagggtttcatagatatcatccgatttgttcaaataatttgagttttgtcgaataattactcttcgatttgtgatttctatctagatctggtgttagtttctagtttgtgcgatcgaatttgtagattaatctgagtttttctgattaacaccacaccaatctggtaccagaaaaggggagaagcaaaaccatgggtaaaaagcctgaactcaccgcgacgtctgtcgagaagtttctgatcgaaaagttcgacagcgtctccgacctgatgcagctctcggagggcgaagaatctcgtgctttcagcttcgatgtaggagggcgtggatatgtcctgcgggtaaatagctgcgccgatggtttctacaaagatcgttatgtttatcggcactttgcatcggccgcgctcccgattccggaagtgcttgacattggggcattcagcgagagcctgacctattgcatctcccgccgtgcacagggtgtcacgttgcaagacctgcctgaaaccgaactgcccgctgttctgcaaccggtcgcggaggcgatggatgccatcgctgcggccgatcttagccagacgagcgggttcggcccattcggaccgcaaggaatcggtcaatacactacatggcgtgatttcatatgcgcgattgctgatccccatgtgtatcactggcaaactgtgatggacgacaccgtcagtgcgtccgtcgcgcaggctctcgatgagctgatgctttgggccgaggactgccccgaagtccggcacctcgtgcacgcggatttcggctccaacaatgtcctgacggacaatggccgcataacagcggtcattgactggagcgaggcgatgttcggggattcccaatacgaggtcgccaacatcttcttctggaggccgtggttggcttgtatggagcagcagacgcgctacttcgagcggaggcatccggagcttgcaggatcgccgcggctccgggcgtatatgctccgcattggtcttgaccaactctatcagagcttggttgacggcaatttcgatgatgcagcttgggcgcagggtcgatgcgacgcaatcgtccgatccggagccgggactgtcgggcgtacacaaatcgcccgcagaagcgcggccgtctggaccgatggctgtgtagaagtactcgccgatagtggaaaccgacgccccagcactcgtccgagggcaaaggaatagatgcatcctgctttaatgagatatgcgagacgcctatgatcgcatgatatttgctttcaattctgttgtgcacgttgtaaaaaacctgagcatgtgtagctcagatccttaccgccggtttcggttcattctaatgaatatatcacccgttactatcgtatttttatgaataatattctccgttcaatttactgattgtaccctactacttatatgtacaatattaaaatgaaaacaatatattgtgctgaataggtttatagcgacatctatgatagagcgccacaataacaaacaattgcgttttattattacaaatccaattttaaaaaaagcggcagaaccggtcaaacctaaaagactgattacataaatcttattcaaatttcaaaagtgccccaggggctagtatctacgacacaccgagcggcgaactaataacgctcactgaagggaactccggttccccgccggcgcgcatgggtgagattccttgaagttgagtattggccgtccgctctaccgaaagttacgggcaccattcaacccggtccagcacggcggccgggtaaccgacttgctgccccgagaattatgcagcatttttttggtgtatgtgggccccaaatgaagtgcaggtcaaaccttgacagtgacgacaaatcgttgggcgggtccagggcgaattttgcgacaacatgtcgaggctcagcaggaccggcatgcaagctagcttactagtgatattctatagtgtcacctaaat

SEQ ID NO: 254 - DNA, 4326 bp, synthetic construct
  misc_feature 1..4326: note = pAGS-0017 CAM 35S promoter
  source 1..4326: mol_type = other DNA
acctcctactccaaaaatgtcaaagatacagtctcagaagaccaaagggctattgagacttttcaacaaagggtaatatcgggaaacctcctcggattccattgcccagctatctgtcacttcatcaaaaggacagtagaaaaggaaggtggcacctacaaatgccatcattgcgataaaggaaaggctatcgttcaagatgcccctgccgacagtggtcccaaagatggacccccacccacgaggagcatcgtggaaaaagaagacgttccaaccacgtcttcaaagcaagtggattgatgtgatatctccactgacgtaagggatgacgcacaatcccactatccttcgcaagacccttcctctatataaggaagttcatttcatttggagaggacagccaacagtattcagtcgactggtaccaacaggctatggtgagcaagggcgaggagctgttcaccggcgtggtgcccatcctggtggagctggacggcgacgtgaacggccacaagttcagcgtgagcggcgagggcgagggcgacgccacctacggcaagctgaccctgaagttcatctgcaccaccggcaagctgcccgtgccctggcccaccctggtgaccaccctgacctacggcgtgcagtgcttcagccgctaccccgaccacatgaagcagcacgacttcttcaagagcgccatgcccgagggctacgtgcaggagcgcaccatcttcttcaaggacgacggcaactacaagacccgcgccgaggtgaagttcgagggcgacaccctggtgaaccgcatcgagctgaagggcatcgacttcaaggaggacggcaacatcctgggccacaagctggagtacaactacaacagccacaacgtgtacatcatggccgacaagcagaagaacggcatcaaggtgaacttcaagatccgccacaacatcgaggacggcagcgtgcagctggccgaccactaccagcagaacacccccatcggcgacggccccgtgctgctgcccgacaaccactacctgagcacccagagcgccctgagcaaggaccccaacgagaagcgcgaccacatggtgctgctggagttcgtgaccgccgccggcatcaccctgggcatggacgagctgtacaagtcaggtggatcctagataacctttaccttcattccctgtaaattggtaccctgcaaagctttcgttcgtatcatcggtttcgacaacgttcgtcaagttcaatgcatcagtttcattgcgcacacaccagaatcctactgagtttgagtattatggcattgggaaaactgtttttcttgtaccatttgttgtgcttgtaatttactgtgttttttattcggttttcgctatcgaactgtgaaatggaaatggatggagaagagttaatgaatgatatggtccttttgttcattctcaaattaatattatttgttttttctcttatttgttgtgtgttgaatttgaaattataagagatatgcaaacattttgttttgagtaaaaatgtgtcaaatcgtggcctctaatgaccgaagttaatatgaggagtaaaacacttgtagttgtaccattatgcttattcactaggcaacaaatatattttcagacctagaaaagctgcaaatgttactgaatacaagtatgtcctcttgtgttttagacatttatgaactttcctttatgtaattttccagaatccttgtcagattctaatcattgctttataattatagttatactcatggatttgtagttgagtatgaaaatattttttaatgcattttatgacttgccaattgattgacaacatgcatcaatcgactagtcgacgagtcagtaataaacggcgtcaaagtggttgcagccggcacacacgagtcgtgtttatcaactcaaagcacaaatacttttcctcaacctaaaaataaggcaattagccaaaaacaactttgcgtgtaaacaacgctcaatacacgtgtcattttattattagctattgcttcaccgccttagctttctcgtgacctagtcgtcctcgtcttttcttcttcttcttctataaaacaatacccaaagagctcttcttcttcacaattcagatttcaatttctcaaaatcttaaaaactttctctcaattctctctaccgtgatcaaggtaaatttctgtgttccttattctctcaaaatcttcgattttgttttcgttcgatcccaatttcgtatatgttctttggtttagattctgttaatcttagatcgaagacgattttctgggtttgatcgttagatatcatcttaattctcgattagggtttcatagatatcatccgatttgttcaaataatttgagttttgtcgaataattactcttcgatttgtgatttctatctagatctggtgttagtttctagtttgtgcgatcgaatttgtagattaatctgagtttttctgattaacaccacaccaatctggtaccagaaaaggggagaagcaaaaccatgggtaaaaagcctgaactcaccgcgacgtctgtcgagaagtttctgatcgaaaagttcgacagcgtctccgacctgatgcagctctcggagggcgaagaatctcgtgctttcagcttcgatgtaggagggcgtggatatgtcctgcgggtaaatagctgcgccgatggtttctacaaagatcgttatgtttatcggcactttgcatcggccgcgctcccgattccggaagtgcttgacattggggcattcagcgagagcctgacctattgcatctcccgccgtgcacagggtgtcacgttgcaagacctgcctgaaaccgaactgcccgctgttctgcaaccggtcgcggaggcgatggatgccatcgctgcggccgatcttagccagacgagcgggttcggcccattcggaccgcaaggaatcggtcaatacactacatggcgtgatttcatatgcgcgattgctgatccccatgtgtatcactggcaaactgtgatggacgacaccgtcagtgcgtccgtcgcgcaggctctcgatgagctgatgctttgggccgaggactgccccgaagtccggcacctcgtgcacgcggatttcggctccaacaatgtcctgacggacaatggccgcataacagcggtcattgactggagcgaggcgatgttcggggattcccaatacgaggtcgccaacatcttcttctggaggccgtggttggcttgtatggagcagcagacgcgctacttcgagcggaggcatccggagcttgcaggatcgccgcggctccgggcgtatatgctccgcattggtcttgaccaactctatcagagcttggttgacggcaatttcgatgatgcagcttgggcgcagggtcgatgcgacgcaatcgtccgatccggagccgggactgtcgggcgtacacaaatcgcccgcagaagcgcggccgtctggaccgatggctgtgtagaagtactcgccgatagtggaaaccgacgccccagcactcgtccgagggcaaaggaatagatgcatcctgctttaatgagatatgcgagacgcctatgatcgcatgatatttgctttcaattctgttgtgcacgttgtaaaaaacctgagcatgtgtagctcagatccttaccgccggtttcggttcattctaatgaatatatcacccgttactatcgtatttttatgaataatattctccgttcaatttactgattgtaccctactacttatatgtacaatattaaaatgaaaacaatatattgtgctgaataggtttatagcgacatctatgatagagcgccacaataacaaacaattgcgttttattattacaaatccaattttaaaaaaagcggcagaaccggtcaaacctaaaagactgattacataaatcttattcaaatttcaaaagtgccccaggggctagtatctacgacacaccgagcggcgaactaataacgctcactgaagggaactccggttccccgccggcgcgcatgggtgagattccttgaagttgagtattggccgtccgctctaccgaaagttacgggcaccattcaacccggtccagcacggcggccgggtaaccgacttgctgccccgagaattatgcagcatttttttggtgtatgtgggccccaaatgaagtgcaggtcaaaccttgacagtgacgacaaatcgttgggcgggtccagggcgaattttgcgacaacatgtcgaggctcagcaggaccggcatgcaagctagcttactagtgatattctatagtgtcacctaaat

SEQ ID NO: 255 - DNA, 4352 bp, synthetic construct
  misc_feature 1..4352: note = pAGS-0018 MAS promoter
  source 1..4352: mol_type = other DNA
acctgtgtaatgtattggtaatttgggaagatataataggaagcaaggctatttatccatttctgaaaaggcgaaatggcgtcaccgcgagcgtcacgcgcattccgttcttgctgtaaagcgttgtttggtacacttttgactagcgaggcttggcgtgtcagcgtatctattcaaaagtcgttaatggctgcggatcaagaaaaagttggaatagaaacagaatacccgcgaaattcaggcccggttgccatgtcctacacgccgaaataaacgaccaaattagtagaaaaataaaaactgactcggatacttacgtcacgtcttgcgcactgatttgaaaaatctcaatataaacaaagacggccacaagaaaaaaccaaaacaccgatattcattaatcttatctagtttctcaaaaaaatcataacagtattcagtcgactggtaccaacaggctatggtgagcaagggcgaggagctgttcaccggcgtggtgcccatcctggtggagctggacggcgacgtgaacggccacaagttcagcgtgagcggcgagggcgagggcgacgccacctacggcaagctgaccctgaagttcatctgcaccaccggcaagctgcccgtgccctggcccaccctggtgaccaccctgacctacggcgtgcagtgcttcagccgctaccccgaccacatgaagcagcacgacttcttcaagagcgccatgcccgagggctacgtgcaggagcgcaccatcttcttcaaggacgacggcaactacaagacccgcgccgaggtgaagttcgagggcgacaccctggtgaaccgcatcgagctgaagggcatcgacttcaaggaggacggcaacatcctgggccacaagctggagtacaactacaacagccacaacgtgtacatcatggccgacaagcagaagaacggcatcaaggtgaacttcaagatccgccacaacatcgaggacggcagcgtgcagctggccgaccactaccagcagaacacccccatcggcgacggccccgtgctgctgcccgacaaccactacctgagcacccagagcgccctgagcaaggaccccaacgagaagcgcgaccacatggtgctgctggagttcgtgaccgccgccggcatcaccctgggcatggacgagctgtacaagtcaggtggatcctagataacctttaccttcattccctgtaaattggtaccctgcaaagctttcgttcgtatcatcggtttcgacaacgttcgtcaagttcaatgcatcagtttcattgcgcacacaccagaatcctactgagtttgagtattatggcattgggaaaactgtttttcttgtaccatttgttgtgcttgtaatttactgtgttttttattcggttttcgctatcgaactgtgaaatggaaatggatggagaagagttaatgaatgatatggtccttttgttcattctcaaattaatattatttgttttttctcttatttgttgtgtgttgaatttgaaattataagagatatgcaaacattttgttttgagtaaaaatgtgtcaaatcgtggcctctaatgaccgaagttaatatgaggagtaaaacacttgtagttgtaccattatgcttattcactaggcaacaaatatattttcagacctagaaaagctgcaaatgttactgaatacaagtatgtcctcttgtgttttagacatttatgaactttcctttatgtaattttccagaatccttgtcagattctaatcattgctttataattatagttatactcatggatttgtagttgagtatgaaaatattttttaatgcattttatgacttgccaattgattgacaacatgcatcaatcgactagtcgacgagtcagtaataaacggcgtcaaagtggttgcagccggcacacacgagtcgtgtttatcaactcaaagcacaaatacttttcctcaacctaaaaataaggcaattagccaaaaacaactttgcgtgtaaacaacgctcaatacacgtgtcattttattattagctattgcttcaccgccttagctttctcgtgacctagtcgtcctcgtcttttcttcttcttcttctataaaacaatacccaaagagctcttcttcttcacaattcagatttcaatttctcaaaatcttaaaaactttctctcaattctctctaccgtgatcaaggtaaatttctgtgttccttattctctcaaaatcttcgattttgttttcgttcgatcccaatttcgtatatgttctttggtttagattctgttaatcttagatcgaagacgattttctgggtttgatcgttagatatcatcttaattctcgattagggtttcatagatatcatccgatttgttcaaataatttgagttttgtcgaataattactcttcgatttgtgatttctatctagatctggtgttagtttctagtttgtgcgatcgaatttgtagattaatctgagtttttctgattaacaccacaccaatctggtaccagaaaaggggagaagcaaaaccatgggtaaaaagcctgaactcaccgcgacgtctgtcgagaagtttctgatcgaaaagttcgacagcgtctccgacctgatgcagctctcggagggcgaagaatctcgtgctttcagcttcgatgtaggagggcgtggatatgtcctgcgggtaaatagctgcgccgatggtttctacaaagatcgttatgtttatcggcactttgcatcggccgcgctcccgattccggaagtgcttgacattggggcattcagcgagagcctgacctattgcatctcccgccgtgcacagggtgtcacgttgcaagacctgcctgaaaccgaactgcccgctgttctgcaaccggtcgcggaggcgatggatgccatcgctgcggccgatcttagccagacgagcgggttcggcccattcggaccgcaaggaatcggtcaatacactacatggcgtgatttcatatgcgcgattgctgatccccatgtgtatcactggcaaactgtgatggacgacaccgtcagtgcgtccgtcgcgcaggctctcgatgagctgatgctttgggccgaggactgccccgaagtccggcacctcgtgcacgcggatttcggctccaacaatgtcctgacggacaatggccgcataacagcggtcattgactggagcgaggcgatgttcggggattcccaatacgaggtcgccaacatcttcttctggaggccgtggttggcttgtatggagcagcagacgcgctacttcgagcggaggcatccggagcttgcaggatcgccgcggctccgggcgtatatgctccgcattggtcttgaccaactctatcagagcttggttgacggcaatttcgatgatgcagcttgggcgcagggtcgatgcgacgcaatcgtccgatccggagccgggactgtcgggcgtacacaaatcgcccgcagaagcgcggccgtctggaccgatggctgtgtagaagtactcgccgatagtggaaaccgacgccccagcactcgtccgagggcaaaggaatagatgcatcctgctttaatgagatatgcgagacgcctatgatcgcatgatatttgctttcaattctgttgtgcacgttgtaaaaaacctgagcatgtgtagctcagatccttaccgccggtttcggttcattctaatgaatatatcacccgttactatcgtatttttatgaataatattctccgttcaatttactgattgtaccctactacttatatgtacaatattaaaatgaaaacaatatattgtgctgaataggtttatagcgacatctatgatagagcgccacaataacaaacaattgcgttttattattacaaatccaattttaaaaaaagcggcagaaccggtcaaacctaaaagactgattacataaatcttattcaaatttcaaaagtgccccaggggctagtatctacgacacaccgagcggcgaactaataacgctcactgaagggaactccggttccccgccggcgcgcatgggtgagattccttgaagttgagtattggccgtccgctctaccgaaagttacgggcaccattcaacccggtccagcacggcggccgggtaaccgacttgctgccccgagaattatgcagcatttttttggtgtatgtgggccccaaatgaagtgcaggtcaaaccttgacagtgacgacaaatcgttgggcgggtccagggcgaattttgcgacaacatgtcgaggctcagcaggaccggcatgcaagctagcttactagtgatattctatagtgtcacctaaat

SEQ ID NO: 256 - DNA, 4421 bp, synthetic construct
  misc_feature 1..4421: note = pAGS-0019 PAR promoter
  source 1..4421: mol_type = other DNA
acctgctgaggcttgacatgattggtgcgtatgtttgtatgaagctacaggactgatttggcgggctatgagggcgggggaagctctggaagggccgcgatggggcgcgcggcgtccagaaggcgccatacggcccgctggcggcacccatccggtataaaagcccgcgaccccgaacggtgacctccactttcagcgacaaacgagcacttatacatacgcgactattctgccgctatacataaccactcagctagcttaagatcccatcaagcttgcatgccgggcgcgccagaaggagcgcagccaaaccaggatgatgtttgatggggtatttgagcacttgcaacccttatccggaagccccctggcccacaaaggctaggcgccaatgcaagcagttcgcatgcagcccctggagcggtgccctcctgataaaccggccagggggcctatgttctttacttttttacaagagaagtcactcaacatcttaaaacagtattcagtcgactggtaccaacaggctatggtgagcaagggcgaggagctgttcaccggcgtggtgcccatcctggtggagctggacggcgacgtgaacggccacaagttcagcgtgagcggcgagggcgagggcgacgccacctacggcaagctgaccctgaagttcatctgcaccaccggcaagctgcccgtgccctggcccaccctggtgaccaccctgacctacggcgtgcagtgcttcagccgctaccccgaccacatgaagcagcacgacttcttcaagagcgccatgcccgagggctacgtgcaggagcgcaccatcttcttcaaggacgacggcaactacaagacccgcgccgaggtgaagttcgagggcgacaccctggtgaaccgcatcgagctgaagggcatcgacttcaaggaggacggcaacatcctgggccacaagctggagtacaactacaacagccacaacgtgtacatcatggccgacaagcagaagaacggcatcaaggtgaacttcaagatccgccacaacatcgaggacggcagcgtgcagctggccgaccactaccagcagaacacccccatcggcgacggccccgtgctgctgcccgacaaccactacctgagcacccagagcgccctgagcaaggaccccaacgagaagcgcgaccacatggtgctgctggagttcgtgaccgccgccggcatcaccctgggcatggacgagctgtacaagtcaggtggatcctagataacctttaccttcattccctgtaaattggtaccctgcaaagctttcgttcgtatcatcggtttcgacaacgttcgtcaagttcaatgcatcagtttcattgcgcacacaccagaatcctactgagtttgagtattatggcattgggaaaactgtttttcttgtaccatttgttgtgcttgtaatttactgtgttttttattcggttttcgctatcgaactgtgaaatggaaatggatggagaagagttaatgaatgatatggtccttttgttcattctcaaattaatattatttgttttttctcttatttgttgtgtgttgaatttgaaattataagagatatgcaaacattttgttttgagtaaaaatgtgtcaaatcgtggcctctaatgaccgaagttaatatgaggagtaaaacacttgtagttgtaccattatgcttattcactaggcaacaaatatattttcagacctagaaaagctgcaaatgttactgaatacaagtatgtcctcttgtgttttagacatttatgaactttcctttatgtaattttccagaatccttgtcagattctaatcattgctttataattatagttatactcatggatttgtagttgagtatgaaaatattttttaatgcattttatgacttgccaattgattgacaacatgcatcaatcgactagtcgacgagtcagtaataaacggcgtcaaagtggttgcagccggcacacacgagtcgtgtttatcaactcaaagcacaaatacttttcctcaacctaaaaataaggcaattagccaaaaacaactttgcgtgtaaacaacgctcaatacacgtgtcattttattattagctattgcttcaccgccttagctttctcgtgacctagtcgtcctcgtcttttcttcttcttcttctataaaacaatacccaaagagctcttcttcttcacaattcagatttcaatttctcaaaatcttaaaaactttctctcaattctctctaccgtgatcaaggtaaatttctgtgttccttattctctcaaaatcttcgattttgttttcgttcgatcccaatttcgtatatgttctttggtttagattctgttaatcttagatcgaagacgattttctgggtttgatcgttagatatcatcttaattctcgattagggtttcatagatatcatccgatttgttcaaataatttgagttttgtcgaataattactcttcgatttgtgatttctatctagatctggtgttagtttctagtttgtgcgatcgaatttgtagattaatctgagtttttctgattaacaccacaccaatctggtaccagaaaaggggagaagcaaaaccatgggtaaaaagcctgaactcaccgcgacgtctgtcgagaagtttctgatcgaaaagttcgacagcgtctccgacctgatgcagctctcggagggcgaagaatctcgtgctttcagcttcgatgtaggagggcgtggatatgtcctgcgggtaaatagctgcgccgatggtttctacaaagatcgttatgtttatcggcactttgcatcggccgcgctcccgattccggaagtgcttgacattggggcattcagcgagagcctgacctattgcatctcccgccgtgcacagggtgtcacgttgcaagacctgcctgaaaccgaactgcccgctgttctgcaaccggtcgcggaggcgatggatgccatcgctgcggccgatcttagccagacgagcgggttcggcccattcggaccgcaaggaatcggtcaatacactacatggcgtgatttcatatgcgcgattgctgatccccatgtgtatcactggcaaactgtgatggacgacaccgtcagtgcgtccgtcgcgcaggctctcgatgagctgatgctttgggccgaggactgccccgaagtccggcacctcgtgcacgcggatttcggctccaacaatgtcctgacggacaatggccgcataacagcggtcattgactggagcgaggcgatgttcggggattcccaatacgaggtcgccaacatcttcttctggaggccgtggttggcttgtatggagcagcagacgcgctacttcgagcggaggcatccggagcttgcaggatcgccgcggctccgggcgtatatgctccgcattggtcttgaccaactctatcagagcttggttgacggcaatttcgatgatgcagcttgggcgcagggtcgatgcgacgcaatcgtccgatccggagccgggactgtcgggcgtacacaaatcgcccgcagaagcgcggccgtctggaccgatggctgtgtagaagtactcgccgatagtggaaaccgacgccccagcactcgtccgagggcaaaggaatagatgcatcctgctttaatgagatatgcgagacgcctatgatcgcatgatatttgctttcaattctgttgtgcacgttgtaaaaaacctgagcatgtgtagctcagatccttaccgccggtttcggttcattctaatgaatatatcacccgttactatcgtatttttatgaataatattctccgttcaatttactgattgtaccctactacttatatgtacaatattaaaatgaaaacaatatattgtgctgaataggtttatagcgacatctatgatagagcgccacaataacaaacaattgcgttttattattacaaatccaattttaaaaaaagcggcagaaccggtcaaacctaaaagactgattacataaatcttattcaaatttcaaaagtgccccaggggctagtatctacgacacaccgagcggcgaactaataacgctcactgaagggaactccggttccccgccggcgcgcatgggtgagattccttgaagttgagtattggccgtccgctctaccgaaagttacgggcaccattcaacccggtccagcacggcggccgggtaaccgacttgctgccccgagaattatgcagcatttttttggtgtatgtgggccccaaatgaagtgcaggtcaaaccttgacagtgacgacaaatcgttgggcgggtccagggcgaattttgcgacaacatgtcgaggctcagcaggaccggcatgcaagctagcttactagtgatattctatagtgtcacctaaat

SEQ ID NO: 257 - DNA, 4749 bp, synthetic construct
  misc_feature 1..4749: note = pAGS-0020 Cv PAS D promoter
  source 1..4749: mol_type = other DNA
acctgatcccacacacctgcccgtctgcctgacaggaagtgaacgcatgtcgagggaggcctcaccaatcgtcacacgagccctcgtcagaaacacgtctccgccacgctctccctctcactgccgaccccgcagcccttttgccctttcctaggccaccgacaggacccaggcgctctcagcatgcctcaacaacccgtactcgtgccagcggtgcccttgtgctggtgatcgcttggaagcgcatgcgaagacgaaggggcggagcaggcggcctggctgttcgaagggctcgccgccagttcgggtgcctttctccacgcgcgcctccacacctaccgatgcgtgaaggcaggcaaatgctcatgtttgcccgaactcggagtccttaaaaagccgcttcttgtcgtcgttccgagacatgttagcagatcgcagtgccacctttcctgacgcgctcggccccatattcggacgcaattgtcatttgtagcacaattggagcaaatctggcgaggcagtaggcttttaagttgcaaggcgagagagcaaagtgggacgcggcgtgattattggtatttacgcgacggcccggcgcgttagcggcccttcccccaggccagggacgattatgtatcaatattgttgcgttcgggcactcgtgcgagggctcctgcgggctggggagggggatctgggaattggaggtacgaccgagatggcttgctcggggggaggtttcctcgccgagcaagccagggttaggtgttgcgctcttgactcgttgtgcattctaggaccccactgctactcacaacaagccaaaacagtattcagtcgactggtaccaacaggctatggtgagcaagggcgaggagctgttcaccggcgtggtgcccatcctggtggagctggacggcgacgtgaacggccacaagttcagcgtgagcggcgagggcgagggcgacgccacctacggcaagctgaccctgaagttcatctgcaccaccggcaagctgcccgtgccctggcccaccctggtgaccaccctgacctacggcgtgcagtgcttcagccgctaccccgaccacatgaagcagcacgacttcttcaagagcgccatgcccgagggctacgtgcaggagcgcaccatcttcttcaaggacgacggcaactacaagacccgcgccgaggtgaagttcgagggcgacaccctggtgaaccgcatcgagctgaagggcatcgacttcaaggaggacggcaacatcctgggccacaagctggagtacaactacaacagccacaacgtgtacatcatggccgacaagcagaagaacggcatcaaggtgaacttcaagatccgccacaacatcgaggacggcagcgtgcagctggccgaccactaccagcagaacacccccatcggcgacggccccgtgctgctgcccgacaaccactacctgagcacccagagcgccctgagcaaggaccccaacgagaagcgcgaccacatggtgctgctggagttcgtgaccgccgccggcatcaccctgggcatggacgagctgtacaagtcaggtggatcctagataacctttaccttcattccctgtaaattggtaccctgcaaagctttcgttcgtatcatcggtttcgacaacgttcgtcaagttcaatgcatcagtttcattgcgcacacaccagaatcctactgagtttgagtattatggcattgggaaaactgtttttcttgtaccatttgttgtgcttgtaatttactgtgttttttattcggttttcgctatcgaactgtgaaatggaaatggatggagaagagttaatgaatgatatggtccttttgttcattctcaaattaatattatttgttttttctcttatttgttgtgtgttgaatttgaaattataagagatatgcaaacattttgttttgagtaaaaatgtgtcaaatcgtggcctctaatgaccgaagttaatatgaggagtaaaacacttgtagttgtaccattatgcttattcactaggcaacaaatatattttcagacctagaaaagctgcaaatgttactgaatacaagtatgtcctcttgtgttttagacatttatgaactttcctttatgtaattttccagaatccttgtcagattctaatcattgctttataattatagttatactcatggatttgtagttgagtatgaaaatattttttaatgcattttatgacttgccaattgattgacaacatgcatcaatcgactagtcgacgagtcagtaataaacggcgtcaaagtggttgcagccggcacacacgagtcgtgtttatcaactcaaagcacaaatacttttcctcaacctaaaaataaggcaattagccaaaaacaactttgcgtgtaaacaacgctcaatacacgtgtcattttattattagctattgcttcaccgccttagctttctcgtgacctagtcgtcctcgtcttttcttcttcttcttctataaaacaatacccaaagagctcttcttcttcacaattcagatttcaatttctcaaaatcttaaaaactttctctcaattctctctaccgtgatcaaggtaaatttctgtgttccttattctctcaaaatcttcgattttgttttcgttcgatcccaatttcgtatatgttctttggtttagattctgttaatcttagatcgaagacgattttctgggtttgatcgttagatatcatcttaattctcgattagggtttcatagatatcatccgatttgttcaaataatttgagttttgtcgaataattactcttcgatttgtgatttctatctagatctggtgttagtttctagtttgtgcgatcgaatttgtagattaatctgagtttttctgattaacaccacaccaatctggtaccagaaaaggggagaagcaaaaccatgggtaaaaagcctgaactcaccgcgacgtctgtcgagaagtttctgatcgaaaagttcgacagcgtctccgacctgatgcagctctcggagggcgaagaatctcgtgctttcagcttcgatgtaggagggcgtggatatgtcctgcgggtaaatagctgcgccgatggtttctacaaagatcgttatgtttatcggcactttgcatcggccgcgctcccgattccggaagtgcttgacattggggcattcagcgagagcctgacctattgcatctcccgccgtgcacagggtgtcacgttgcaagacctgcctgaaaccgaactgcccgctgttctgcaaccggtcgcggaggcgatggatgccatcgctgcggccgatcttagccagacgagcgggttcggcccattcggaccgcaaggaatcggtcaatacactacatggcgtgatttcatatgcgcgattgctgatccccatgtgtatcactggcaaactgtgatggacgacaccgtcagtgcgtccgtcgcgcaggctctcgatgagctgatgctttgggccgaggactgccccgaagtccggcacctcgtgcacgcggatttcggctccaacaatgtcctgacggacaatggccgcataacagcggtcattgactggagcgaggcgatgttcggggattcccaatacgaggtcgccaacatcttcttctggaggccgtggttggcttgtatggagcagcagacgcgctacttcgagcggaggcatccggagcttgcaggatcgccgcggctccgggcgtatatgctccgcattggtcttgaccaactctatcagagcttggttgacggcaatttcgatgatgcagcttgggcgcagggtcgatgcgacgcaatcgtccgatccggagccgggactgtcgggcgtacacaaatcgcccgcagaagcgcggccgtctggaccgatggctgtgtagaagtactcgccgatagtggaaaccgacgccccagcactcgtccgagggcaaaggaatagatgcatcctgctttaatgagatatgcgagacgcctatgatcgcatgatatttgctttcaattctgttgtgcacgttgtaaaaaacctgagcatgtgtagctcagatccttaccgccggtttcggttcattctaatgaatatatcacccgttactatcgtatttttatgaataatattctccgttcaatttactgattgtaccctactacttatatgtacaatattaaaatgaaaacaatatattgtgctgaataggtttatagcgacatctatgatagagcgccacaataacaaacaattgcgttttattattacaaatccaattttaaaaaaagcggcagaaccggtcaaacctaaaagactgattacataaatcttattcaaatttcaaaagtgccccaggggctagtatctacgacacaccgagcggcgaactaataacgctcactgaagggaactccggttccccgccggcgcgcatgggtgagattccttgaagttgagtattggccgtccgctctaccgaaagttacgggcaccattcaacccggtccagcacggcggccgggtaaccgacttgctgccccgagaattatgcagcatttttttggtgtatgtgggccccaaatgaagtgcaggtcaaaccttgacagtgacgacaaatcgttgggcgggtccagggcgaattttgcgacaacatgtcgaggctcagcaggaccggcatgcaagctagcttactagtgatattctatagtgtcacctaaat

SEQ ID NO: 258 - DNA, 4132 bp, synthetic construct
  misc_feature 1..4132: note = pAGS-0021 CMV promoter
  source 1..4132: mol_type = other DNA
acctgtgatgcggttttggcagtacatcaatgggcgtggatagcggtttgactcacggggatttccaagtctccaccccattgacgtcaatgggagtttgttttggcaccaaaatcaacgggactttccaaaatgtcgtaacaactccgccccattgacgcaaatgggcggtaggcgtgtacggtgggaggtctatataagcagagctaacagtattcagtcgactggtaccaacaggctatggtgagcaagggcgaggagctgttcaccggcgtggtgcccatcctggtggagctggacggcgacgtgaacggccacaagttcagcgtgagcggcgagggcgagggcgacgccacctacggcaagctgaccctgaagttcatctgcaccaccggcaagctgcccgtgccctggcccaccctggtgaccaccctgacctacggcgtgcagtgcttcagccgctaccccgaccacatgaagcagcacgacttcttcaagagcgccatgcccgagggctacgtgcaggagcgcaccatcttcttcaaggacgacggcaactacaagacccgcgccgaggtgaagttcgagggcgacaccctggtgaaccgcatcgagctgaagggcatcgacttcaaggaggacggcaacatcctgggccacaagctggagtacaactacaacagccacaacgtgtacatcatggccgacaagcagaagaacggcatcaaggtgaacttcaagatccgccacaacatcgaggacggcagcgtgcagctggccgaccactaccagcagaacacccccatcggcgacggccccgtgctgctgcccgacaaccactacctgagcacccagagcgccctgagcaaggaccccaacgagaagcgcgaccacatggtgctgctggagttcgtgaccgccgccggcatcaccctgggcatggacgagctgtacaagtcaggtggatcctagataacctttaccttcattccctgtaaattggtaccctgcaaagctttcgttcgtatcatcggtttcgacaacgttcgtcaagttcaatgcatcagtttcattgcgcacacaccagaatcctactgagtttgagtattatggcattgggaaaactgtttttcttgtaccatttgttgtgcttgtaatttactgtgttttttattcggttttcgctatcgaactgtgaaatggaaatggatggagaagagttaatgaatgatatggtccttttgttcattctcaaattaatattatttgttttttctcttatttgttgtgtgttgaatttgaaattataagagatatgcaaacattttgttttgagtaaaaatgtgtcaaatcgtggcctctaatgaccgaagttaatatgaggagtaaaacacttgtagttgtaccattatgcttattcactaggcaacaaatatattttcagacctagaaaagctgcaaatgttactgaatacaagtatgtcctcttgtgttttagacatttatgaactttcctttatgtaattttccagaatccttgtcagattctaatcattgctttataattatagttatactcatggatttgtagttgagtatgaaaatattttttaatgcattttatgacttgccaattgattgacaacatgcatcaatcgactagtcgacgagtcagtaataaacggcgtcaaagtggttgcagccggcacacacgagtcgtgtttatcaactcaaagcacaaatacttttcctcaacctaaaaataaggcaattagccaaaaacaactttgcgtgtaaacaacgctcaatacacgtgtcattttattattagctattgcttcaccgccttagctttctcgtgacctagtcgtcctcgtcttttcttcttcttcttctataaaacaatacccaaagagctcttcttcttcacaattcagatttcaatttctcaaaatcttaaaaactttctctcaattctctctaccgtgatcaaggtaaatttctgtgttccttattctctcaaaatcttcgattttgttttcgttcgatcccaatttcgtatatgttctttggtttagattctgttaatcttagatcgaagacgattttctgggtttgatcgttagatatcatcttaattctcgattagggtttcatagatatcatccgatttgttcaaataatttgagttttgtcgaataattactcttcgatttgtgatttctatctagatctggtgttagtttctagtttgtgcgatcgaatttgtagattaatctgagtttttctgattaacaccacaccaatctggtaccagaaaaggggagaagcaaaaccatgggtaaaaagcctgaactcaccgcgacgtctgtcgagaagtttctgatcgaaaagttcgacagcgtctccgacctgatgcagctctcggagggcgaagaatctcgtgctttcagcttcgatgtaggagggcgtggatatgtcctgcgggtaaatagctgcgccgatggtttctacaaagatcgttatgtttatcggcactttgcatcggccgcgctcccgattccggaagtgcttgacattggggcattcagcgagagcctgacctattgcatctcccgccgtgcacagggtgtcacgttgcaagacctgcctgaaaccgaactgcccgctgttctgcaaccggtcgcggaggcgatggatgccatcgctgcggccgatcttagccagacgagcgggttcggcccattcggaccgcaaggaatcggtcaatacactacatggcgtgatttcatatgcgcgattgctgatccccatgtgtatcactggcaaactgtgatggacgacaccgtcagtgcgtccgtcgcgcaggctctcgatgagctgatgctttgggccgaggactgccccgaagtccggcacctcgtgcacgcggatttcggctccaacaatgtcctgacggacaatggccgcataacagcggtcattgactggagcgaggcgatgttcggggattcccaatacgaggtcgccaacatcttcttctggaggccgtggttggcttgtatggagcagcagacgcgctacttcgagcggaggcatccggagcttgcaggatcgccgcggctccgggcgtatatgctccgcattggtcttgaccaactctatcagagcttggttgacggcaatttcgatgatgcagcttgggcgcagggtcgatgcgacgcaatcgtccgatccggagccgggactgtcgggcgtacacaaatcgcccgcagaagcgcggccgtctggaccgatggctgtgtagaagtactcgccgatagtggaaaccgacgccccagcactcgtccgagggcaaaggaatagatgcatcctgctttaatgagatatgcgagacgcctatgatcgcatgatatttgctttcaattctgttgtgcacgttgtaaaaaacctgagcatgtgtagctcagatccttaccgccggtttcggttcattctaatgaatatatcacccgttactatcgtatttttatgaataatattctccgttcaatttactgattgtaccctactacttatatgtacaatattaaaatgaaaacaatatattgtgctgaataggtttatagcgacatctatgatagagcgccacaataacaaacaattgcgttttattattacaaatccaattttaaaaaaagcggcagaaccggtcaaacctaaaagactgattacataaatcttattcaaatttcaaaagtgccccaggggctagtatctacgacacaccgagcggcgaactaataacgctcactgaagggaactccggttccccgccggcgcgcatgggtgagattccttgaagttgagtattggccgtccgctctaccgaaagttacgggcaccattcaacccggtccagcacggcggccgggtaaccgacttgctgccccgagaattatgcagcatttttttggtgtatgtgggccccaaatgaagtgcaggtcaaaccttgacagtgacgacaaatcgttgggcgggtccagggcgaattttgcgacaacatgtcgaggctcagcaggaccggcatgcaagctagcttactagtgatattctatagtgtcacctaaat

SEQ ID NO: 259 - DNA, 4436 bp, synthetic construct
  misc_feature 1..4436: note = pAGS-0022 CMV promoter +enhancer
  source 1..4436: mol_type = other DNA
acctcgttacataacttacggtaaatggcccgcctggctgaccgcccaacgacccccgcccattgacgtcaataatgacgtatgttcccatagtaacgccaatagggactttccattgacgtcaatgggtggagtatttacggtaaactgcccacttggcagtacatcaagtgtatcatatgccaagtacgccccctattgacgtcaatgacggtaaatggcccgcctggcattatgcccagtacatgaccttatgggactttcctacttggcagtacatctacgtattagtcatcgctattaccatggtgatgcggttttggcagtacatcaatgggcgtggatagcggtttgactcacggggatttccaagtctccaccccattgacgtcaatgggagtttgttttggcaccaaaatcaacgggactttccaaaatgtcgtaacaactccgccccattgacgcaaatgggcggtaggcgtgtacggtgggaggtctatataagcagagctaacagtattcagtcgactggtaccaacaggctatggtgagcaagggcgaggagctgttcaccggcgtggtgcccatcctggtggagctggacggcgacgtgaacggccacaagttcagcgtgagcggcgagggcgagggcgacgccacctacggcaagctgaccctgaagttcatctgcaccaccggcaagctgcccgtgccctggcccaccctggtgaccaccctgacctacggcgtgcagtgcttcagccgctaccccgaccacatgaagcagcacgacttcttcaagagcgccatgcccgagggctacgtgcaggagcgcaccatcttcttcaaggacgacggcaactacaagacccgcgccgaggtgaagttcgagggcgacaccctggtgaaccgcatcgagctgaagggcatcgacttcaaggaggacggcaacatcctgggccacaagctggagtacaactacaacagccacaacgtgtacatcatggccgacaagcagaagaacggcatcaaggtgaacttcaagatccgccacaacatcgaggacggcagcgtgcagctggccgaccactaccagcagaacacccccatcggcgacggccccgtgctgctgcccgacaaccactacctgagcacccagagcgccctgagcaaggaccccaacgagaagcgcgaccacatggtgctgctggagttcgtgaccgccgccggcatcaccctgggcatggacgagctgtacaagtcaggtggatcctagataacctttaccttcattccctgtaaattggtaccctgcaaagctttcgttcgtatcatcggtttcgacaacgttcgtcaagttcaatgcatcagtttcattgcgcacacaccagaatcctactgagtttgagtattatggcattgggaaaactgtttttcttgtaccatttgttgtgcttgtaatttactgtgttttttattcggttttcgctatcgaactgtgaaatggaaatggatggagaagagttaatgaatgatatggtccttttgttcattctcaaattaatattatttgttttttctcttatttgttgtgtgttgaatttgaaattataagagatatgcaaacattttgttttgagtaaaaatgtgtcaaatcgtggcctctaatgaccgaagttaatatgaggagtaaaacacttgtagttgtaccattatgcttattcactaggcaacaaatatattttcagacctagaaaagctgcaaatgttactgaatacaagtatgtcctcttgtgttttagacatttatgaactttcctttatgtaattttccagaatccttgtcagattctaatcattgctttataattatagttatactcatggatttgtagttgagtatgaaaatattttttaatgcattttatgacttgccaattgattgacaacatgcatcaatcgactagtcgacgagtcagtaataaacggcgtcaaagtggttgcagccggcacacacgagtcgtgtttatcaactcaaagcacaaatacttttcctcaacctaaaaataaggcaattagccaaaaacaactttgcgtgtaaacaacgctcaatacacgtgtcattttattattagctattgcttcaccgccttagctttctcgtgacctagtcgtcctcgtcttttcttcttcttcttctataaaacaatacccaaagagctcttcttcttcacaattcagatttcaatttctcaaaatcttaaaaactttctctcaattctctctaccgtgatcaaggtaaatttctgtgttccttattctctcaaaatcttcgattttgttttcgttcgatcccaatttcgtatatgttctttggtttagattctgttaatcttagatcgaagacgattttctgggtttgatcgttagatatcatcttaattctcgattagggtttcatagatatcatccgatttgttcaaataatttgagttttgtcgaataattactcttcgatttgtgatttctatctagatctggtgttagtttctagtttgtgcgatcgaatttgtagattaatctgagtttttctgattaacaccacaccaatctggtaccagaaaaggggagaagcaaaaccatgggtaaaaagcctgaactcaccgcgacgtctgtcgagaagtttctgatcgaaaagttcgacagcgtctccgacctgatgcagctctcggagggcgaagaatctcgtgctttcagcttcgatgtaggagggcgtggatatgtcctgcgggtaaatagctgcgccgatggtttctacaaagatcgttatgtttatcggcactttgcatcggccgcgctcccgattccggaagtgcttgacattggggcattcagcgagagcctgacctattgcatctcccgccgtgcacagggtgtcacgttgcaagacctgcctgaaaccgaactgcccgctgttctgcaaccggtcgcggaggcgatggatgccatcgctgcggccgatcttagccagacgagcgggttcggcccattcggaccgcaaggaatcggtcaatacactacatggcgtgatttcatatgcgcgattgctgatccccatgtgtatcactggcaaactgtgatggacgacaccgtcagtgcgtccgtcgcgcaggctctcgatgagctgatgctttgggccgaggactgccccgaagtccggcacctcgtgcacgcggatttcggctccaacaatgtcctgacggacaatggccgcataacagcggtcattgactggagcgaggcgatgttcggggattcccaatacgaggtcgccaacatcttcttctggaggccgtggttggcttgtatggagcagcagacgcgctacttcgagcggaggcatccggagcttgcaggatcgccgcggctccgggcgtatatgctccgcattggtcttgaccaactctatcagagcttggttgacggcaatttcgatgatgcagcttgggcgcagggtcgatgcgacgcaatcgtccgatccggagccgggactgtcgggcgtacacaaatcgcccgcagaagcgcggccgtctggaccgatggctgtgtagaagtactcgccgatagtggaaaccgacgccccagcactcgtccgagggcaaaggaatagatgcatcctgctttaatgagatatgcgagacgcctatgatcgcatgatatttgctttcaattctgttgtgcacgttgtaaaaaacctgagcatgtgtagctcagatccttaccgccggtttcggttcattctaatgaatatatcacccgttactatcgtatttttatgaataatattctccgttcaatttactgattgtaccctactacttatatgtacaatattaaaatgaaaacaatatattgtgctgaataggtttatagcgacatctatgatagagcgccacaataacaaacaattgcgttttattattacaaatccaattttaaaaaaagcggcagaaccggtcaaacctaaaagactgattacataaatcttattcaaatttcaaaagtgccccaggggctagtatctacgacacaccgagcggcgaactaataacgctcactgaagggaactccggttccccgccggcgcgcatgggtgagattccttgaagttgagtattggccgtccgctctaccgaaagttacgggcaccattcaacccggtccagcacggcggccgggtaaccgacttgctgccccgagaattatgcagcatttttttggtgtatgtgggccccaaatgaagtgcaggtcaaaccttgacagtgacgacaaatcgttgggcgggtccagggcgaattttgcgacaacatgtcgaggctcagcaggaccggcatgcaagctagcttactagtgatattctatagtgtcacctaaat

SEQ ID NO: 260 - DNA, 4286 bp, synthetic construct
  misc_feature 1..4286: note = pAGS-0023 SV40 promoter
  source 1..4286: mol_type = other DNA
acctctgaggcggaaagaaccagctgtggaatgtgtgtcagttagggtgtggaaagtccccaggctccccagcaggcagaagtatgcaaagcatgcatctcaattagtcagcaaccaggtgtggaaagtccccaggctccccagcaggcagaagtatgcaaagcatgcatctcaattagtcagcaaccatagtcccgcccctaactccgcccatcccgcccctaactccgcccagttccgcccattctccgccccatggctgactaattttttttatttatgcagaggccgaggccgcctcggcctctgagctattccagaagtagtgaggaggcttttttggaggcctaggcttttgcaaaaacagtattcagtcgactggtaccaacaggctatggtgagcaagggcgaggagctgttcaccggcgtggtgcccatcctggtggagctggacggcgacgtgaacggccacaagttcagcgtgagcggcgagggcgagggcgacgccacctacggcaagctgaccctgaagttcatctgcaccaccggcaagctgcccgtgccctggcccaccctggtgaccaccctgacctacggcgtgcagtgcttcagccgctaccccgaccacatgaagcagcacgacttcttcaagagcgccatgcccgagggctacgtgcaggagcgcaccatcttcttcaaggacgacggcaactacaagacccgcgccgaggtgaagttcgagggcgacaccctggtgaaccgcatcgagctgaagggcatcgacttcaaggaggacggcaacatcctgggccacaagctggagtacaactacaacagccacaacgtgtacatcatggccgacaagcagaagaacggcatcaaggtgaacttcaagatccgccacaacatcgaggacggcagcgtgcagctggccgaccactaccagcagaacacccccatcggcgacggccccgtgctgctgcccgacaaccactacctgagcacccagagcgccctgagcaaggaccccaacgagaagcgcgaccacatggtgctgctggagttcgtgaccgccgccggcatcaccctgggcatggacgagctgtacaagtcaggtggatcctagataacctttaccttcattccctgtaaattggtaccctgcaaagctttcgttcgtatcatcggtttcgacaacgttcgtcaagttcaatgcatcagtttcattgcgcacacaccagaatcctactgagtttgagtattatggcattgggaaaactgtttttcttgtaccatttgttgtgcttgtaatttactgtgttttttattcggttttcgctatcgaactgtgaaatggaaatggatggagaagagttaatgaatgatatggtccttttgttcattctcaaattaatattatttgttttttctcttatttgttgtgtgttgaatttgaaattataagagatatgcaaacattttgttttgagtaaaaatgtgtcaaatcgtggcctctaatgaccgaagttaatatgaggagtaaaacacttgtagttgtaccattatgcttattcactaggcaacaaatatattttcagacctagaaaagctgcaaatgttactgaatacaagtatgtcctcttgtgttttagacatttatgaactttcctttatgtaattttccagaatccttgtcagattctaatcattgctttataattatagttatactcatggatttgtagttgagtatgaaaatattttttaatgcattttatgacttgccaattgattgacaacatgcatcaatcgactagtcgacgagtcagtaataaacggcgtcaaagtggttgcagccggcacacacgagtcgtgtttatcaactcaaagcacaaatacttttcctcaacctaaaaataaggcaattagccaaaaacaactttgcgtgtaaacaacgctcaatacacgtgtcattttattattagctattgcttcaccgccttagctttctcgtgacctagtcgtcctcgtcttttcttcttcttcttctataaaacaatacccaaagagctcttcttcttcacaattcagatttcaatttctcaaaatcttaaaaactttctctcaattctctctaccgtgatcaaggtaaatttctgtgttccttattctctcaaaatcttcgattttgttttcgttcgatcccaatttcgtatatgttctttggtttagattctgttaatcttagatcgaagacgattttctgggtttgatcgttagatatcatcttaattctcgattagggtttcatagatatcatccgatttgttcaaataatttgagttttgtcgaataattactcttcgatttgtgatttctatctagatctggtgttagtttctagtttgtgcgatcgaatttgtagattaatctgagtttttctgattaacaccacaccaatctggtaccagaaaaggggagaagcaaaaccatgggtaaaaagcctgaactcaccgcgacgtctgtcgagaagtttctgatcgaaaagttcgacagcgtctccgacctgatgcagctctcggagggcgaagaatctcgtgctttcagcttcgatgtaggagggcgtggatatgtcctgcgggtaaatagctgcgccgatggtttctacaaagatcgttatgtttatcggcactttgcatcggccgcgctcccgattccggaagtgcttgacattggggcattcagcgagagcctgacctattgcatctcccgccgtgcacagggtgtcacgttgcaagacctgcctgaaaccgaactgcccgctgttctgcaaccggtcgcggaggcgatggatgccatcgctgcggccgatcttagccagacgagcgggttcggcccattcggaccgcaaggaatcggtcaatacactacatggcgtgatttcatatgcgcgattgctgatccccatgtgtatcactggcaaactgtgatggacgacaccgtcagtgcgtccgtcgcgcaggctctcgatgagctgatgctttgggccgaggactgccccgaagtccggcacctcgtgcacgcggatttcggctccaacaatgtcctgacggacaatggccgcataacagcggtcattgactggagcgaggcgatgttcggggattcccaatacgaggtcgccaacatcttcttctggaggccgtggttggcttgtatggagcagcagacgcgctacttcgagcggaggcatccggagcttgcaggatcgccgcggctccgggcgtatatgctccgcattggtcttgaccaactctatcagagcttggttgacggcaatttcgatgatgcagcttgggcgcagggtcgatgcgacgcaatcgtccgatccggagccgggactgtcgggcgtacacaaatcgcccgcagaagcgcggccgtctggaccgatggctgtgtagaagtactcgccgatagtggaaaccgacgccccagcactcgtccgagggcaaaggaatagatgcatcctgctttaatgagatatgcgagacgcctatgatcgcatgatatttgctttcaattctgttgtgcacgttgtaaaaaacctgagcatgtgtagctcagatccttaccgccggtttcggttcattctaatgaatatatcacccgttactatcgtatttttatgaataatattctccgttcaatttactgattgtaccctactacttatatgtacaatattaaaatgaaaacaatatattgtgctgaataggtttatagcgacatctatgatagagcgccacaataacaaacaattgcgttttattattacaaatccaattttaaaaaaagcggcagaaccggtcaaacctaaaagactgattacataaatcttattcaaatttcaaaagtgccccaggggctagtatctacgacacaccgagcggcgaactaataacgctcactgaagggaactccggttccccgccggcgcgcatgggtgagattccttgaagttgagtattggccgtccgctctaccgaaagttacgggcaccattcaacccggtccagcacggcggccgggtaaccgacttgctgccccgagaattatgcagcatttttttggtgtatgtgggccccaaatgaagtgcaggtcaaaccttgacagtgacgacaaatcgttgggcgggtccagggcgaattttgcgacaacatgtcgaggctcagcaggaccggcatgcaagctagcttactagtgatattctatagtgtcacctaaat

SEQ ID NO: 261 - DNA, 4392 bp, synthetic construct
  misc_feature 1..4392: note = pAGS-0024 SV40 promoter + enhancer
  source 1..4392: mol_type = other DNA
acctcgcggaacccctatttgtttatttttctaaatacattcaaatatgtatccgctcatgagacaataaccctgataaatgcttcaataatattgaaaaaggaagagtcctgaggcggaaagaaccagctgtggaatgtgtgtcagttagggtgtggaaagtccccaggctccccagcaggcagaagtatgcaaagcatgcatctcaattagtcagcaaccaggtgtggaaagtccccaggctccccagcaggcagaagtatgcaaagcatgcatctcaattagtcagcaaccatagtcccgcccctaactccgcccatcccgcccctaactccgcccagttccgcccattctccgccccatggctgactaattttttttatttatgcagaggccgaggccgcctcggcctctgagctattccagaagtagtgaggaggcttttttggaggcctaggcttttgcaaaaacagtattcagtcgactggtaccaacaggctatggtgagcaagggcgaggagctgttcaccggcgtggtgcccatcctggtggagctggacggcgacgtgaacggccacaagttcagcgtgagcggcgagggcgagggcgacgccacctacggcaagctgaccctgaagttcatctgcaccaccggcaagctgcccgtgccctggcccaccctggtgaccaccctgacctacggcgtgcagtgcttcagccgctaccccgaccacatgaagcagcacgacttcttcaagagcgccatgcccgagggctacgtgcaggagcgcaccatcttcttcaaggacgacggcaactacaagacccgcgccgaggtgaagttcgagggcgacaccctggtgaaccgcatcgagctgaagggcatcgacttcaaggaggacggcaacatcctgggccacaagctggagtacaactacaacagccacaacgtgtacatcatggccgacaagcagaagaacggcatcaaggtgaacttcaagatccgccacaacatcgaggacggcagcgtgcagctggccgaccactaccagcagaacacccccatcggcgacggccccgtgctgctgcccgacaaccactacctgagcacccagagcgccctgagcaaggaccccaacgagaagcgcgaccacatggtgctgctggagttcgtgaccgccgccggcatcaccctgggcatggacgagctgtacaagtcaggtggatcctagataacctttaccttcattccctgtaaattggtaccctgcaaagctttcgttcgtatcatcggtttcgacaacgttcgtcaagttcaatgcatcagtttcattgcgcacacaccagaatcctactgagtttgagtattatggcattgggaaaactgtttttcttgtaccatttgttgtgcttgtaatttactgtgttttttattcggttttcgctatcgaactgtgaaatggaaatggatggagaagagttaatgaatgatatggtccttttgttcattctcaaattaatattatttgttttttctcttatttgttgtgtgttgaatttgaaattataagagatatgcaaacattttgttttgagtaaaaatgtgtcaaatcgtggcctctaatgaccgaagttaatatgaggagtaaaacacttgtagttgtaccattatgcttattcactaggcaacaaatatattttcagacctagaaaagctgcaaatgttactgaatacaagtatgtcctcttgtgttttagacatttatgaactttcctttatgtaattttccagaatccttgtcagattctaatcattgctttataattatagttatactcatggatttgtagttgagtatgaaaatattttttaatgcattttatgacttgccaattgattgacaacatgcatcaatcgactagtcgacgagtcagtaataaacggcgtcaaagtggttgcagccggcacacacgagtcgtgtttatcaactcaaagcacaaatacttttcctcaacctaaaaataaggcaattagccaaaaacaactttgcgtgtaaacaacgctcaatacacgtgtcattttattattagctattgcttcaccgccttagctttctcgtgacctagtcgtcctcgtcttttcttcttcttcttctataaaacaatacccaaagagctcttcttcttcacaattcagatttcaatttctcaaaatcttaaaaactttctctcaattctctctaccgtgatcaaggtaaatttctgtgttccttattctctcaaaatcttcgattttgttttcgttcgatcccaatttcgtatatgttctttggtttagattctgttaatcttagatcgaagacgattttctgggtttgatcgttagatatcatcttaattctcgattagggtttcatagatatcatccgatttgttcaaataatttgagttttgtcgaataattactcttcgatttgtgatttctatctagatctggtgttagtttctagtttgtgcgatcgaatttgtagattaatctgagtttttctgattaacaccacaccaatctggtaccagaaaaggggagaagcaaaaccatgggtaaaaagcctgaactcaccgcgacgtctgtcgagaagtttctgatcgaaaagttcgacagcgtctccgacctgatgcagctctcggagggcgaagaatctcgtgctttcagcttcgatgtaggagggcgtggatatgtcctgcgggtaaatagctgcgccgatggtttctacaaagatcgttatgtttatcggcactttgcatcggccgcgctcccgattccggaagtgcttgacattggggcattcagcgagagcctgacctattgcatctcccgccgtgcacagggtgtcacgttgcaagacctgcctgaaaccgaactgcccgctgttctgcaaccggtcgcggaggcgatggatgccatcgctgcggccgatcttagccagacgagcgggttcggcccattcggaccgcaaggaatcggtcaatacactacatggcgtgatttcatatgcgcgattgctgatccccatgtgtatcactggcaaactgtgatggacgacaccgtcagtgcgtccgtcgcgcaggctctcgatgagctgatgctttgggccgaggactgccccgaagtccggcacctcgtgcacgcggatttcggctccaacaatgtcctgacggacaatggccgcataacagcggtcattgactggagcgaggcgatgttcggggattcccaatacgaggtcgccaacatcttcttctggaggccgtggttggcttgtatggagcagcagacgcgctacttcgagcggaggcatccggagcttgcaggatcgccgcggctccgggcgtatatgctccgcattggtcttgaccaactctatcagagcttggttgacggcaatttcgatgatgcagcttgggcgcagggtcgatgcgacgcaatcgtccgatccggagccgggactgtcgggcgtacacaaatcgcccgcagaagcgcggccgtctggaccgatggctgtgtagaagtactcgccgatagtggaaaccgacgccccagcactcgtccgagggcaaaggaatagatgcatcctgctttaatgagatatgcgagacgcctatgatcgcatgatatttgctttcaattctgttgtgcacgttgtaaaaaacctgagcatgtgtagctcagatccttaccgccggtttcggttcattctaatgaatatatcacccgttactatcgtatttttatgaataatattctccgttcaatttactgattgtaccctactacttatatgtacaatattaaaatgaaaacaatatattgtgctgaataggtttatagcgacatctatgatagagcgccacaataacaaacaattgcgttttattattacaaatccaattttaaaaaaagcggcagaaccggtcaaacctaaaagactgattacataaatcttattcaaatttcaaaagtgccccaggggctagtatctacgacacaccgagcggcgaactaataacgctcactgaagggaactccggttccccgccggcgcgcatgggtgagattccttgaagttgagtattggccgtccgctctaccgaaagttacgggcaccattcaacccggtccagcacggcggccgggtaaccgacttgctgccccgagaattatgcagcatttttttggtgtatgtgggccccaaatgaagtgcaggtcaaaccttgacagtgacgacaaatcgttgggcgggtccagggcgaattttgcgacaacatgtcgaggctcagcaggaccggcatgcaagctagcttactagtgatattctatagtgtcacctaaat

SEQ ID NO: 262 - DNA, 6801 bp, synthetic construct
  misc_feature 1..6801: note = pAGS-0025 EF2 promoter
  source 1..6801: mol_type = other DNA
acctgtgatgcggttttggcagtacatcaatgggcgtggatagcggtttgactcacggggatttccaagtctccaccccattgacgtcaatgggagtttgttttggcaccaaaatcaacgggactttccaaaatgtcgtaacaactccgccccattgacgcaaatgggcggtaggcgtgtacggtgggaggtctatataagcagagctaacagtattcagtcgactggtaccaacaggctatggtgagcaagggcgaggagctgttcaccggggtggtgcccatcctggtcgagctggacggcgacgtaaacggccacaagttcagcgtgtccggcgagggcgagggcgatgccacctacggcaagctgaccctgaagttcatctgcaccaccggcaagctgcccgtgccctggcccaccctcgtgaccaccctgacctacggcgtgcagtgcttcagccgctaccccgaccacatgaagcagcacgacttcttcaagtccgccatgcccgaaggctacgtccaggagcgcaccatcttcttcaaggacgacggcaactacaagacccgcgccgaggtgaagttcgagggcgacaccctggtgaaccgcatcgagctgaagggcatcgacttcaaggaggacggcaacatcctggggcacaagctggagtacaactacaacagccacaacgtctatatcatggccgacaagcagaagaacggcatcaaggtgaacttcaagatccgccacaacatcgaggacggcagcgtgcagctcgccgaccactaccagcagaacacccccatcggcgacggccccgtgctgctgcccgacaaccactacctgagcacccagtccgccctgagcaaagaccccaacgagaagcgcgatcacatggtcctgctggagttcgtgaccgccgccgggatcactctcggcatggacgagctgtacaagtcaggtggatcctagataacctttaccttcattccctgtaaattggtaccctgcaaagctttcgttcgtatcatcggtttcgacaacgttcgtcaagttcaatgcatcagtttcattgcgcacacaccagaatcctactgagtttgagtattatggcattgggaaaactgtttttcttgtaccatttgttgtgcttgtaatttactgtgttttttattcggttttcgctatcgaactgtgaaatggaaatggatggagaagagttaatgaatgatatggtccttttgttcattctcaaattaatattatttgttttttctcttatttgttgtgtgttgaatttgaaattataagagatatgcaaacattttgttttgagtaaaaatgtgtcaaatcgtggcctctaatgaccgaagttaatatgaggagtaaaacacttgtagttgtaccattatgcttattcactaggcaacaaatatattttcagacctagaaaagctgcaaatgttactgaatacaagtatgtcctcttgtgttttagacatttatgaactttcctttatgtaattttccagaatccttgtcagattctaatcattgctttataattatagttatactcatggatttgtagttgagtatgaaaatattttttaatgcattttatgacttgccaattgattgacaacatgcatcaatcgactagtcgacgagtcagtaataaacggcgtcaaagtggttgcagccggcacacacgagtcgtgtttatcaactcaaagcacaaatacttttcctcaacctaaaaataaggcaattagccaaaaacaactttgcgtgtaaacaacgctcaatacacgtgtcattttattattagctattgcttcaccgccttagctttctcgtgacctagtcgtcctcgtcttttcttcttcttcttctataaaacaatacccaaagagctcttcttcttcacaattcagatttcaatttctcaaaatcttaaaaactttctctcaattctctctaccgtgatcaaggtaaatttctgtgttccttattctctcaaaatcttcgattttgttttcgttcgatcccaatttcgtatatgttctttggtttagattctgttaatcttagatcgaagacgattttctgggtttgatcgttagatatcatcttaattctcgattagggtttcatagatatcatccgatttgttcaaataatttgagttttgtcgaataattactcttcgatttgtgatttctatctagatctggtgttagtttctagtttgtgcgatcgaatttgtagattaatctgagtttttctgattaacaccacaccaatctggtaccagaaaaggggagaagcaaaaccatgggtaaaaagcctgaactcaccgcgacgtctgtcgagaagtttctgatcgaaaagttcgacagcgtctccgacctgatgcagctctcggagggcgaagaatctcgtgctttcagcttcgatgtaggagggcgtggatatgtcctgcgggtaaatagctgcgccgatggtttctacaaagatcgttatgtttatcggcactttgcatcggccgcgctcccgattccggaagtgcttgacattggggcattcagcgagagcctgacctattgcatctcccgccgtgcacagggtgtcacgttgcaagacctgcctgaaaccgaactgcccgctgttctgcaaccggtcgcggaggcgatggatgccatcgctgcggccgatcttagccagacgagcgggttcggcccattcggaccgcaaggaatcggtcaatacactacatggcgtgatttcatatgcgcgattgctgatccccatgtgtatcactggcaaactgtgatggacgacaccgtcagtgcgtccgtcgcgcaggctctcgatgagctgatgctttgggccgaggactgccccgaagtccggcacctcgtgcacgcggatttcggctccaacaatgtcctgacggacaatggccgcataacagcggtcattgactggagcgaggcgatgttcggggattcccaatacgaggtcgccaacatcttcttctggaggccgtggttggcttgtatggagcagcagacgcgctacttcgagcggaggcatccggagcttgcaggatcgccgcggctccgggcgtatatgctccgcattggtcttgaccaactctatcagagcttggttgacggcaatttcgatgatgcagcttgggcgcagggtcgatgcgacgcaatcgtccgatccggagccgggactgtcgggcgtacacaaatcgcccgcagaagcgcggccgtctggaccgatggctgtgtagaagtactcgccgatagtggaaaccgacgccccagcactcgtccgagggcaaaggaatagatgcatcctgctttaatgagatatgcgagacgcctatgatcgcatgatatttgctttcaattctgttgtgcacgttgtaaaaaacctgagcatgtgtagctcagatccttaccgccggtttcggttcattctaatgaatatatcacccgttactatcgtatttttatgaataatattctccgttcaatttactgattgtaccctactacttatatgtacaatattaaaatgaaaacaatatattgtgctgaataggtttatagcgacatctatgatagagcgccacaataacaaacaattgcgttttattattacaaatccaattttaaaaaaagcggcagaaccggtcaaacctaaaagactgattacataaatcttattcaaatttcaaaagtgccccaggggctagtatctacgacacaccgagcggcgaactaataacgctcactgaagggaactccggttccccgccggcgcgcatgggtgagattccttgaagttgagtattggccgtccgctctaccgaaagttacgggcaccattcaacccggtccagcacggcggccgggtaaccgacttgctgccccgagaattatgcagcatttttttggtgtatgtgggccccaaatgaagtgcaggtcaaaccttgacagtgacgacaaatcgttgggcgggtccagggcgaattttgcgacaacatgtcgaggctcagcaggaccggcatgcaagctagcttactagtgatattctatagtgtcacctaaatgtattctagaccaagcatgcacagctggcgttctcagccagatccaacgttacaccacaatatatcctgccaagatctaattccggggatcggaaatccagaagcccgagaggttgccgcctttcgggctttttctttttcaaaaaaaaaaatttataaaacgatctgttgcggccggccgccgggttgtgggcaaaggcgctcgacggtgggcaaccgcttgcggttgtccacgggcggagccggtgcgcgtagcgcattgtccacaagccaagggcgaccaataattgatatatatattcataattgaaaagctaattgaacatactacttgctgtaactacttgccggagcgaggggtgtttgcaagctgttgatctgaaagggctattagcgttctcacgtgcctttttgattagcgatttcacgtgaccttattagcgatttcacgtactccgattagcgatttcacgtaccctgattagcgatttcacgtggatagtttttggagcgggccggaaagccccgtgaatcaaggctttgcggggcattagcggtttcacgtggataactaccctctatccacaggcttccggggataaaaaagcccgctcgacggcgggctgttggatggggatcgcctgaatcgccccatcatccagccagaaagtgagggagccacggttgatgagagctttgttgtaggtggaccagttggtgattttgaacttttgctttgccacggaacggtctgcgttgtcgggaagatgcgtgatctgatccttcaactcagcaaaagttcgatttattcaacaaagccacgttgtgtctcaaaatctctgatgttacattgcacaagataaaaatatatcatcatgaacaataaaactgtctgcttacataaacagtaatacaaggggtgttatgagggaagcggtgatcgccgaagtatcgactcaactatcagaggtagttggcgtcatcgagcgccatctcgaaccgacgttgctggccgtacatttgtacggctccgcagtggatggcggcctgaagccacacagtgatattgatttgctggttacggtgaccgtaaggcttgatgaaacaacgcggcgagctttgatcaacgaccttttggaaacttcggcttcccctggagagagcgagattctccgcgctgtagaagtcaccattgttgtgcacgacgacatcattccgtggcgttatccagctaagcgcgaactgcaatttggagaatggcagcgcaatgacattcttgcaggtatcttcgagccagccacgatcgacattgatctggctatcttgctgacaaaagcaagagaacatagcgttgccttggtaggtccagcggcggaggaactctttgatccggttcctgaacaggatctatttgaggcgctaaatgaaaccttaacgctatggaactcgccgcccgactgggctggcgatgagcgaaatgtagtgcttacgttgtcccgcatttggtacagcgcagtaaccggcaaaatcgcgccgaaggatgtcgctgccgactgggcaatggagcgcctgccggcccagtatcagcccgtcatacttgaagctaggcaggcttatcttggacaagaagatcgcttggcctcgcgcgcagatcagttggaagaatttgttcactacgtgaaaggcgagatcaccaaggtagtcggcaaataatcactagaccaatgttacacatatatactttagattgatttaaaacttcatttttaatttaaaaggatctaggtgaagatcctttttgataatctcatgaccaaaatcccttaacgtgagttttcgttccactgagcgtcagaccccgtagaaaagatcaaaggatcttcttgagatcctttttttctgcgcgtaatctgctgcttgcaaacaaaaaaaccaccgctaccagcggtggtttgtttgccggatcaagagctaccaactcttcttccgaaggtaactggcttcagcagagcgcagataccaaatactgttcttctagtgtagccgtagttaggccaccacttcaagaactctgtagcaccgcctacatacctcgctctgctaatcctgttaccagtggctgctgccagtggcgataagtcgtgtcttaccgggttggactcaagacgatagttaccggataaggcgcagcggtcgggctgaacggggggttcgtgcacacagcccagcttggagcgaacgacctacaccgaactgagatacctacagcgtgagctatgagaaagcgccacgcttcccgaagggagaaaggcggacaggtatccggtaagcggcagggtcggaacaggagagcgcacgagggagcttccagggggaaacgcctggtatctttatagtcctgtcgggtttcgccacctctgacttgagcgtcgatttttgtgatgctcgtcaggggggcggagcctatggaaaaacgccagcaacgcggcctttttacggttcctggccttttgctggccttttgctcacatgagatctcaaacaaacacatacagcgacttagtttacccgccaatatatcctgtcaaggctcgaactaggctcggacgaagtaagcggccgcaaccttaattaaacacggcgcgccaacagcgatcgcaccaggtacc

SEQ ID NO: 263 - DNA, 7105 bp, synthetic construct
  misc_feature 1..7105: note = pAGS-0026 Histone 4 promoter
  source 1..7105: mol_type = other DNA
acctcgttacataacttacggtaaatggcccgcctggctgaccgcccaacgacccccgcccattgacgtcaataatgacgtatgttcccatagtaacgccaatagggactttccattgacgtcaatgggtggagtatttacggtaaactgcccacttggcagtacatcaagtgtatcatatgccaagtacgccccctattgacgtcaatgacggtaaatggcccgcctggcattatgcccagtacatgaccttatgggactttcctacttggcagtacatctacgtattagtcatcgctattaccatggtgatgcggttttggcagtacatcaatgggcgtggatagcggtttgactcacggggatttccaagtctccaccccattgacgtcaatgggagtttgttttggcaccaaaatcaacgggactttccaaaatgtcgtaacaactccgccccattgacgcaaatgggcggtaggcgtgtacggtgggaggtctatataagcagagctaacagtattcagtcgactggtaccaacaggctatggtgagcaagggcgaggagctgttcaccggggtggtgcccatcctggtcgagctggacggcgacgtaaacggccacaagttcagcgtgtccggcgagggcgagggcgatgccacctacggcaagctgaccctgaagttcatctgcaccaccggcaagctgcccgtgccctggcccaccctcgtgaccaccctgacctacggcgtgcagtgcttcagccgctaccccgaccacatgaagcagcacgacttcttcaagtccgccatgcccgaaggctacgtccaggagcgcaccatcttcttcaaggacgacggcaactacaagacccgcgccgaggtgaagttcgagggcgacaccctggtgaaccgcatcgagctgaagggcatcgacttcaaggaggacggcaacatcctggggcacaagctggagtacaactacaacagccacaacgtctatatcatggccgacaagcagaagaacggcatcaaggtgaacttcaagatccgccacaacatcgaggacggcagcgtgcagctcgccgaccactaccagcagaacacccccatcggcgacggccccgtgctgctgcccgacaaccactacctgagcacccagtccgccctgagcaaagaccccaacgagaagcgcgatcacatggtcctgctggagttcgtgaccgccgccgggatcactctcggcatggacgagctgtacaagtcaggtggatcctagataacctttaccttcattccctgtaaattggtaccctgcaaagctttcgttcgtatcatcggtttcgacaacgttcgtcaagttcaatgcatcagtttcattgcgcacacaccagaatcctactgagtttgagtattatggcattgggaaaactgtttttcttgtaccatttgttgtgcttgtaatttactgtgttttttattcggttttcgctatcgaactgtgaaatggaaatggatggagaagagttaatgaatgatatggtccttttgttcattctcaaattaatattatttgttttttctcttatttgttgtgtgttgaatttgaaattataagagatatgcaaacattttgttttgagtaaaaatgtgtcaaatcgtggcctctaatgaccgaagttaatatgaggagtaaaacacttgtagttgtaccattatgcttattcactaggcaacaaatatattttcagacctagaaaagctgcaaatgttactgaatacaagtatgtcctcttgtgttttagacatttatgaactttcctttatgtaattttccagaatccttgtcagattctaatcattgctttataattatagttatactcatggatttgtagttgagtatgaaaatattttttaatgcattttatgacttgccaattgattgacaacatgcatcaatcgactagtcgacgagtcagtaataaacggcgtcaaagtggttgcagccggcacacacgagtcgtgtttatcaactcaaagcacaaatacttttcctcaacctaaaaataaggcaattagccaaaaacaactttgcgtgtaaacaacgctcaatacacgtgtcattttattattagctattgcttcaccgccttagctttctcgtgacctagtcgtcctcgtcttttcttcttcttcttctataaaacaatacccaaagagctcttcttcttcacaattcagatttcaatttctcaaaatcttaaaaactttctctcaattctctctaccgtgatcaaggtaaatttctgtgttccttattctctcaaaatcttcgattttgttttcgttcgatcccaatttcgtatatgttctttggtttagattctgttaatcttagatcgaagacgattttctgggtttgatcgttagatatcatcttaattctcgattagggtttcatagatatcatccgatttgttcaaataatttgagttttgtcgaataattactcttcgatttgtgatttctatctagatctggtgttagtttctagtttgtgcgatcgaatttgtagattaatctgagtttttctgattaacaccacaccaatctggtaccagaaaaggggagaagcaaaaccatgggtaaaaagcctgaactcaccgcgacgtctgtcgagaagtttctgatcgaaaagttcgacagcgtctccgacctgatgcagctctcggagggcgaagaatctcgtgctttcagcttcgatgtaggagggcgtggatatgtcctgcgggtaaatagctgcgccgatggtttctacaaagatcgttatgtttatcggcactttgcatcggccgcgctcccgattccggaagtgcttgacattggggcattcagcgagagcctgacctattgcatctcccgccgtgcacagggtgtcacgttgcaagacctgcctgaaaccgaactgcccgctgttctgcaaccggtcgcggaggcgatggatgccatcgctgcggccgatcttagccagacgagcgggttcggcccattcggaccgcaaggaatcggtcaatacactacatggcgtgatttcatatgcgcgattgctgatccccatgtgtatcactggcaaactgtgatggacgacaccgtcagtgcgtccgtcgcgcaggctctcgatgagctgatgctttgggccgaggactgccccgaagtccggcacctcgtgcacgcggatttcggctccaacaatgtcctgacggacaatggccgcataacagcggtcattgactggagcgaggcgatgttcggggattcccaatacgaggtcgccaacatcttcttctggaggccgtggttggcttgtatggagcagcagacgcgctacttcgagcggaggcatccggagcttgcaggatcgccgcggctccgggcgtatatgctccgcattggtcttgaccaactctatcagagcttggttgacggcaatttcgatgatgcagcttgggcgcagggtcgatgcgacgcaatcgtccgatccggagccgggactgtcgggcgtacacaaatcgcccgcagaagcgcggccgtctggaccgatggctgtgtagaagtactcgccgatagtggaaaccgacgccccagcactcgtccgagggcaaaggaatagatgcatcctgctttaatgagatatgcgagacgcctatgatcgcatgatatttgctttcaattctgttgtgcacgttgtaaaaaacctgagcatgtgtagctcagatccttaccgccggtttcggttcattctaatgaatatatcacccgttactatcgtatttttatgaataatattctccgttcaatttactgattgtaccctactacttatatgtacaatattaaaatgaaaacaatatattgtgctgaataggtttatagcgacatctatgatagagcgccacaataacaaacaattgcgttttattattacaaatccaattttaaaaaaagcggcagaaccggtcaaacctaaaagactgattacataaatcttattcaaatttcaaaagtgccccaggggctagtatctacgacacaccgagcggcgaactaataacgctcactgaagggaactccggttccccgccggcgcgcatgggtgagattccttgaagttgagtattggccgtccgctctaccgaaagttacgggcaccattcaacccggtccagcacggcggccgggtaaccgacttgctgccccgagaattatgcagcatttttttggtgtatgtgggccccaaatgaagtgcaggtcaaaccttgacagtgacgacaaatcgttgggcgggtccagggcgaattttgcgacaacatgtcgaggctcagcaggaccggcatgcaagctagcttactagtgatattctatagtgtcacctaaatgtattctagaccaagcatgcacagctggcgttctcagccagatccaacgttacaccacaatatatcctgccaagatctaattccggggatcggaaatccagaagcccgagaggttgccgcctttcgggctttttctttttcaaaaaaaaaaatttataaaacgatctgttgcggccggccgccgggttgtgggcaaaggcgctcgacggtgggcaaccgcttgcggttgtccacgggcggagccggtgcgcgtagcgcattgtccacaagccaagggcgaccaataattgatatatatattcataattgaaaagctaattgaacatactacttgctgtaactacttgccggagcgaggggtgtttgcaagctgttgatctgaaagggctattagcgttctcacgtgcctttttgattagcgatttcacgtgaccttattagcgatttcacgtactccgattagcgatttcacgtaccctgattagcgatttcacgtggatagtttttggagcgggccggaaagccccgtgaatcaaggctttgcggggcattagcggtttcacgtggataactaccctctatccacaggcttccggggataaaaaagcccgctcgacggcgggctgttggatggggatcgcctgaatcgccccatcatccagccagaaagtgagggagccacggttgatgagagctttgttgtaggtggaccagttggtgattttgaacttttgctttgccacggaacggtctgcgttgtcgggaagatgcgtgatctgatccttcaactcagcaaaagttcgatttattcaacaaagccacgttgtgtctcaaaatctctgatgttacattgcacaagataaaaatatatcatcatgaacaataaaactgtctgcttacataaacagtaatacaaggggtgttatgagggaagcggtgatcgccgaagtatcgactcaactatcagaggtagttggcgtcatcgagcgccatctcgaaccgacgttgctggccgtacatttgtacggctccgcagtggatggcggcctgaagccacacagtgatattgatttgctggttacggtgaccgtaaggcttgatgaaacaacgcggcgagctttgatcaacgaccttttggaaacttcggcttcccctggagagagcgagattctccgcgctgtagaagtcaccattgttgtgcacgacgacatcattccgtggcgttatccagctaagcgcgaactgcaatttggagaatggcagcgcaatgacattcttgcaggtatcttcgagccagccacgatcgacattgatctggctatcttgctgacaaaagcaagagaacatagcgttgccttggtaggtccagcggcggaggaactctttgatccggttcctgaacaggatctatttgaggcgctaaatgaaaccttaacgctatggaactcgccgcccgactgggctggcgatgagcgaaatgtagtgcttacgttgtcccgcatttggtacagcgcagtaaccggcaaaatcgcgccgaaggatgtcgctgccgactgggcaatggagcgcctgccggcccagtatcagcccgtcatacttgaagctaggcaggcttatcttggacaagaagatcgcttggcctcgcgcgcagatcagttggaagaatttgttcactacgtgaaaggcgagatcaccaaggtagtcggcaaataatcactagaccaatgttacacatatatactttagattgatttaaaacttcatttttaatttaaaaggatctaggtgaagatcctttttgataatctcatgaccaaaatcccttaacgtgagttttcgttccactgagcgtcagaccccgtagaaaagatcaaaggatcttcttgagatcctttttttctgcgcgtaatctgctgcttgcaaacaaaaaaaccaccgctaccagcggtggtttgtttgccggatcaagagctaccaactcttcttccgaaggtaactggcttcagcagagcgcagataccaaatactgttcttctagtgtagccgtagttaggccaccacttcaagaactctgtagcaccgcctacatacctcgctctgctaatcctgttaccagtggctgctgccagtggcgataagtcgtgtcttaccgggttggactcaagacgatagttaccggataaggcgcagcggtcgggctgaacggggggttcgtgcacacagcccagcttggagcgaacgacctacaccgaactgagatacctacagcgtgagctatgagaaagcgccacgcttcccgaagggagaaaggcggacaggtatccggtaagcggcagggtcggaacaggagagcgcacgagggagcttccagggggaaacgcctggtatctttatagtcctgtcgggtttcgccacctctgacttgagcgtcgatttttgtgatgctcgtcaggggggcggagcctatggaaaaacgccagcaacgcggcctttttacggttcctggccttttgctggccttttgctcacatgagatctcaaacaaacacatacagcgacttagtttacccgccaatatatcctgtcaaggctcgaactaggctcggacgaagtaagcggccgcaaccttaattaaacacggcgcgccaacagcgatcgcaccaggtacc

SEQ ID NO: 264 - DNA, 6955 bp, synthetic construct
  misc_feature 1..6955: note = pAGS-0027 Lhcf.1 promoter
  source 1..6955: mol_type = other DNA
acctctgaggcggaaagaaccagctgtggaatgtgtgtcagttagggtgtggaaagtccccaggctccccagcaggcagaagtatgcaaagcatgcatctcaattagtcagcaaccaggtgtggaaagtccccaggctccccagcaggcagaagtatgcaaagcatgcatctcaattagtcagcaaccatagtcccgcccctaactccgcccatcccgcccctaactccgcccagttccgcccattctccgccccatggctgactaattttttttatttatgcagaggccgaggccgcctcggcctctgagctattccagaagtagtgaggaggcttttttggaggcctaggcttttgcaaaaacagtattcagtcgactggtaccaacaggctatggtgagcaagggcgaggagctgttcaccggggtggtgcccatcctggtcgagctggacggcgacgtaaacggccacaagttcagcgtgtccggcgagggcgagggcgatgccacctacggcaagctgaccctgaagttcatctgcaccaccggcaagctgcccgtgccctggcccaccctcgtgaccaccctgacctacggcgtgcagtgcttcagccgctaccccgaccacatgaagcagcacgacttcttcaagtccgccatgcccgaaggctacgtccaggagcgcaccatcttcttcaaggacgacggcaactacaagacccgcgccgaggtgaagttcgagggcgacaccctggtgaaccgcatcgagctgaagggcatcgacttcaaggaggacggcaacatcctggggcacaagctggagtacaactacaacagccacaacgtctatatcatggccgacaagcagaagaacggcatcaaggtgaacttcaagatccgccacaacatcgaggacggcagcgtgcagctcgccgaccactaccagcagaacacccccatcggcgacggccccgtgctgctgcccgacaaccactacctgagcacccagtccgccctgagcaaagaccccaacgagaagcgcgatcacatggtcctgctggagttcgtgaccgccgccgggatcactctcggcatggacgagctgtacaagtcaggtggatcctagataacctttaccttcattccctgtaaattggtaccctgcaaagctttcgttcgtatcatcggtttcgacaacgttcgtcaagttcaatgcatcagtttcattgcgcacacaccagaatcctactgagtttgagtattatggcattgggaaaactgtttttcttgtaccatttgttgtgcttgtaatttactgtgttttttattcggttttcgctatcgaactgtgaaatggaaatggatggagaagagttaatgaatgatatggtccttttgttcattctcaaattaatattatttgttttttctcttatttgttgtgtgttgaatttgaaattataagagatatgcaaacattttgttttgagtaaaaatgtgtcaaatcgtggcctctaatgaccgaagttaatatgaggagtaaaacacttgtagttgtaccattatgcttattcactaggcaacaaatatattttcagacctagaaaagctgcaaatgttactgaatacaagtatgtcctcttgtgttttagacatttatgaactttcctttatgtaattttccagaatccttgtcagattctaatcattgctttataattatagttatactcatggatttgtagttgagtatgaaaatattttttaatgcattttatgacttgccaattgattgacaacatgcatcaatcgactagtcgacgagtcagtaataaacggcgtcaaagtggttgcagccggcacacacgagtcgtgtttatcaactcaaagcacaaatacttttcctcaacctaaaaataaggcaattagccaaaaacaactttgcgtgtaaacaacgctcaatacacgtgtcattttattattagctattgcttcaccgccttagctttctcgtgacctagtcgtcctcgtcttttcttcttcttcttctataaaacaatacccaaagagctcttcttcttcacaattcagatttcaatttctcaaaatcttaaaaactttctctcaattctctctaccgtgatcaaggtaaatttctgtgttccttattctctcaaaatcttcgattttgttttcgttcgatcccaatttcgtatatgttctttggtttagattctgttaatcttagatcgaagacgattttctgggtttgatcgttagatatcatcttaattctcgattagggtttcatagatatcatccgatttgttcaaataatttgagttttgtcgaataattactcttcgatttgtgatttctatctagatctggtgttagtttctagtttgtgcgatcgaatttgtagattaatctgagtttttctgattaacaccacaccaatctggtaccagaaaaggggagaagcaaaaccatgggtaaaaagcctgaactcaccgcgacgtctgtcgagaagtttctgatcgaaaagttcgacagcgtctccgacctgatgcagctctcggagggcgaagaatctcgtgctttcagcttcgatgtaggagggcgtggatatgtcctgcgggtaaatagctgcgccgatggtttctacaaagatcgttatgtttatcggcactttgcatcggccgcgctcccgattccggaagtgcttgacattggggcattcagcgagagcctgacctattgcatctcccgccgtgcacagggtgtcacgttgcaagacctgcctgaaaccgaactgcccgctgttctgcaaccggtcgcggaggcgatggatgccatcgctgcggccgatcttagccagacgagcgggttcggcccattcggaccgcaaggaatcggtcaatacactacatggcgtgatttcatatgcgcgattgctgatccccatgtgtatcactggcaaactgtgatggacgacaccgtcagtgcgtccgtcgcgcaggctctcgatgagctgatgctttgggccgaggactgccccgaagtccggcacctcgtgcacgcggatttcggctccaacaatgtcctgacggacaatggccgcataacagcggtcattgactggagcgaggcgatgttcggggattcccaatacgaggtcgccaacatcttcttctggaggccgtggttggcttgtatggagcagcagacgcgctacttcgagcggaggcatccggagcttgcaggatcgccgcggctccgggcgtatatgctccgcattggtcttgaccaactctatcagagcttggttgacggcaatttcgatgatgcagcttgggcgcagggtcgatgcgacgcaatcgtccgatccggagccgggactgtcgggcgtacacaaatcgcccgcagaagcgcggccgtctggaccgatggctgtgtagaagtactcgccgatagtggaaaccgacgccccagcactcgtccgagggcaaaggaatagatgcatcctgctttaatgagatatgcgagacgcctatgatcgcatgatatttgctttcaattctgttgtgcacgttgtaaaaaacctgagcatgtgtagctcagatccttaccgccggtttcggttcattctaatgaatatatcacccgttactatcgtatttttatgaataatattctccgttcaatttactgattgtaccctactacttatatgtacaatattaaaatgaaaacaatatattgtgctgaataggtttatagcgacatctatgatagagcgccacaataacaaacaattgcgttttattattacaaatccaattttaaaaaaagcggcagaaccggtcaaacctaaaagactgattacataaatcttattcaaatttcaaaagtgccccaggggctagtatctacgacacaccgagcggcgaactaataacgctcactgaagggaactccggttccccgccggcgcgcatgggtgagattccttgaagttgagtattggccgtccgctctaccgaaagttacgggcaccattcaacccggtccagcacggcggccgggtaaccgacttgctgccccgagaattatgcagcatttttttggtgtatgtgggccccaaatgaagtgcaggtcaaaccttgacagtgacgacaaatcgttgggcgggtccagggcgaattttgcgacaacatgtcgaggctcagcaggaccggcatgcaagctagcttactagtgatattctatagtgtcacctaaatgtattctagaccaagcatgcacagctggcgttctcagccagatccaacgttacaccacaatatatcctgccaagatctaattccggggatcggaaatccagaagcccgagaggttgccgcctttcgggctttttctttttcaaaaaaaaaaatttataaaacgatctgttgcggccggccgccgggttgtgggcaaaggcgctcgacggtgggcaaccgcttgcggttgtccacgggcggagccggtgcgcgtagcgcattgtccacaagccaagggcgaccaataattgatatatatattcataattgaaaagctaattgaacatactacttgctgtaactacttgccggagcgaggggtgtttgcaagctgttgatctgaaagggctattagcgttctcacgtgcctttttgattagcgatttcacgtgaccttattagcgatttcacgtactccgattagcgatttcacgtaccctgattagcgatttcacgtggatagtttttggagcgggccggaaagccccgtgaatcaaggctttgcggggcattagcggtttcacgtggataactaccctctatccacaggcttccggggataaaaaagcccgctcgacggcgggctgttggatggggatcgcctgaatcgccccatcatccagccagaaagtgagggagccacggttgatgagagctttgttgtaggtggaccagttggtgattttgaacttttgctttgccacggaacggtctgcgttgtcgggaagatgcgtgatctgatccttcaactcagcaaaagttcgatttattcaacaaagccacgttgtgtctcaaaatctctgatgttacattgcacaagataaaaatatatcatcatgaacaataaaactgtctgcttacataaacagtaatacaaggggtgttatgagggaagcggtgatcgccgaagtatcgactcaactatcagaggtagttggcgtcatcgagcgccatctcgaaccgacgttgctggccgtacatttgtacggctccgcagtggatggcggcctgaagccacacagtgatattgatttgctggttacggtgaccgtaaggcttgatgaaacaacgcggcgagctttgatcaacgaccttttggaaacttcggcttcccctggagagagcgagattctccgcgctgtagaagtcaccattgttgtgcacgacgacatcattccgtggcgttatccagctaagcgcgaactgcaatttggagaatggcagcgcaatgacattcttgcaggtatcttcgagccagccacgatcgacattgatctggctatcttgctgacaaaagcaagagaacatagcgttgccttggtaggtccagcggcggaggaactctttgatccggttcctgaacaggatctatttgaggcgctaaatgaaaccttaacgctatggaactcgccgcccgactgggctggcgatgagcgaaatgtagtgcttacgttgtcccgcatttggtacagcgcagtaaccggcaaaatcgcgccgaaggatgtcgctgccgactgggcaatggagcgcctgccggcccagtatcagcccgtcatacttgaagctaggcaggcttatcttggacaagaagatcgcttggcctcgcgcgcagatcagttggaagaatttgttcactacgtgaaaggcgagatcaccaaggtagtcggcaaataatcactagaccaatgttacacatatatactttagattgatttaaaacttcatttttaatttaaaaggatctaggtgaagatcctttttgataatctcatgaccaaaatcccttaacgtgagttttcgttccactgagcgtcagaccccgtagaaaagatcaaaggatcttcttgagatcctttttttctgcgcgtaatctgctgcttgcaaacaaaaaaaccaccgctaccagcggtggtttgtttgccggatcaagagctaccaactcttcttccgaaggtaactggcttcagcagagcgcagataccaaatactgttcttctagtgtagccgtagttaggccaccacttcaagaactctgtagcaccgcctacatacctcgctctgctaatcctgttaccagtggctgctgccagtggcgataagtcgtgtcttaccgggttggactcaagacgatagttaccggataaggcgcagcggtcgggctgaacggggggttcgtgcacacagcccagcttggagcgaacgacctacaccgaactgagatacctacagcgtgagctatgagaaagcgccacgcttcccgaagggagaaaggcggacaggtatccggtaagcggcagggtcggaacaggagagcgcacgagggagcttccagggggaaacgcctggtatctttatagtcctgtcgggtttcgccacctctgacttgagcgtcgatttttgtgatgctcgtcaggggggcggagcctatggaaaaacgccagcaacgcggcctttttacggttcctggccttttgctggccttttgctcacatgagatctcaaacaaacacatacagcgacttagtttacccgccaatatatcctgtcaaggctcgaactaggctcggacgaagtaagcggccgcaaccttaattaaacacggcgcgccaacagcgatcgcaccaggtacc

SEQ ID NO: 265 - DNA, 7061 bp, synthetic construct
  misc_feature 1..7061: note = pAGS-0028 Ubi.U4 promoter
  source 1..7061: mol_type = other DNA
acctcgcggaacccctatttgtttatttttctaaatacattcaaatatgtatccgctcatgagacaataaccctgataaatgcttcaataatattgaaaaaggaagagtcctgaggcggaaagaaccagctgtggaatgtgtgtcagttagggtgtggaaagtccccaggctccccagcaggcagaagtatgcaaagcatgcatctcaattagtcagcaaccaggtgtggaaagtccccaggctccccagcaggcagaagtatgcaaagcatgcatctcaattagtcagcaaccatagtcccgcccctaactccgcccatcccgcccctaactccgcccagttccgcccattctccgccccatggctgactaattttttttatttatgcagaggccgaggccgcctcggcctctgagctattccagaagtagtgaggaggcttttttggaggcctaggcttttgcaaaaacagtattcagtcgactggtaccaacaggctatggtgagcaagggcgaggagctgttcaccggggtggtgcccatcctggtcgagctggacggcgacgtaaacggccacaagttcagcgtgtccggcgagggcgagggcgatgccacctacggcaagctgaccctgaagttcatctgcaccaccggcaagctgcccgtgccctggcccaccctcgtgaccaccctgacctacggcgtgcagtgcttcagccgctaccccgaccacatgaagcagcacgacttcttcaagtccgccatgcccgaaggctacgtccaggagcgcaccatcttcttcaaggacgacggcaactacaagacccgcgccgaggtgaagttcgagggcgacaccctggtgaaccgcatcgagctgaagggcatcgacttcaaggaggacggcaacatcctggggcacaagctggagtacaactacaacagccacaacgtctatatcatggccgacaagcagaagaacggcatcaaggtgaacttcaagatccgccacaacatcgaggacggcagcgtgcagctcgccgaccactaccagcagaacacccccatcggcgacggccccgtgctgctgcccgacaaccactacctgagcacccagtccgccctgagcaaagaccccaacgagaagcgcgatcacatggtcctgctggagttcgtgaccgccgccgggatcactctcggcatggacgagctgtacaagtcaggtggatcctagataacctttaccttcattccctgtaaattggtaccctgcaaagctttcgttcgtatcatcggtttcgacaacgttcgtcaagttcaatgcatcagtttcattgcgcacacaccagaatcctactgagtttgagtattatggcattgggaaaactgtttttcttgtaccatttgttgtgcttgtaatttactgtgttttttattcggttttcgctatcgaactgtgaaatggaaatggatggagaagagttaatgaatgatatggtccttttgttcattctcaaattaatattatttgttttttctcttatttgttgtgtgttgaatttgaaattataagagatatgcaaacattttgttttgagtaaaaatgtgtcaaatcgtggcctctaatgaccgaagttaatatgaggagtaaaacacttgtagttgtaccattatgcttattcactaggcaacaaatatattttcagacctagaaaagctgcaaatgttactgaatacaagtatgtcctcttgtgttttagacatttatgaactttcctttatgtaattttccagaatccttgtcagattctaatcattgctttataattatagttatactcatggatttgtagttgagtatgaaaatattttttaatgcattttatgacttgccaattgattgacaacatgcatcaatcgactagtcgacgagtcagtaataaacggcgtcaaagtggttgcagccggcacacacgagtcgtgtttatcaactcaaagcacaaatacttttcctcaacctaaaaataaggcaattagccaaaaacaactttgcgtgtaaacaacgctcaatacacgtgtcattttattattagctattgcttcaccgccttagctttctcgtgacctagtcgtcctcgtcttttcttcttcttcttctataaaacaatacccaaagagctcttcttcttcacaattcagatttcaatttctcaaaatcttaaaaactttctctcaattctctctaccgtgatcaaggtaaatttctgtgttccttattctctcaaaatcttcgattttgttttcgttcgatcccaatttcgtatatgttctttggtttagattctgttaatcttagatcgaagacgattttctgggtttgatcgttagatatcatcttaattctcgattagggtttcatagatatcatccgatttgttcaaataatttgagttttgtcgaataattactcttcgatttgtgatttctatctagatctggtgttagtttctagtttgtgcgatcgaatttgtagattaatctgagtttttctgattaacaccacaccaatctggtaccagaaaaggggagaagcaaaaccatgggtaaaaagcctgaactcaccgcgacgtctgtcgagaagtttctgatcgaaaagttcgacagcgtctccgacctgatgcagctctcggagggcgaagaatctcgtgctttcagcttcgatgtaggagggcgtggatatgtcctgcgggtaaatagctgcgccgatggtttctacaaagatcgttatgtttatcggcactttgcatcggccgcgctcccgattccggaagtgcttgacattggggcattcagcgagagcctgacctattgcatctcccgccgtgcacagggtgtcacgttgcaagacctgcctgaaaccgaactgcccgctgttctgcaaccggtcgcggaggcgatggatgccatcgctgcggccgatcttagccagacgagcgggttcggcccattcggaccgcaaggaatcggtcaatacactacatggcgtgatttcatatgcgcgattgctgatccccatgtgtatcactggcaaactgtgatggacgacaccgtcagtgcgtccgtcgcgcaggctctcgatgagctgatgctttgggccgaggactgccccgaagtccggcacctcgtgcacgcggatttcggctccaacaatgtcctgacggacaatggccgcataacagcggtcattgactggagcgaggcgatgttcggggattcccaatacgaggtcgccaacatcttcttctggaggccgtggttggcttgtatggagcagcagacgcgctacttcgagcggaggcatccggagcttgcaggatcgccgcggctccgggcgtatatgctccgcattggtcttgaccaactctatcagagcttggttgacggcaatttcgatgatgcagcttgggcgcagggtcgatgcgacgcaatcgtccgatccggagccgggactgtcgggcgtacacaaatcgcccgcagaagcgcggccgtctggaccgatggctgtgtagaagtactcgccgatagtggaaaccgacgccccagcactcgtccgagggcaaaggaatagatgcatcctgctttaatgagatatgcgagacgcctatgatcgcatgatatttgctttcaattctgttgtgcacgttgtaaaaaacctgagcatgtgtagctcagatccttaccgccggtttcggttcattctaatgaatatatcacccgttactatcgtatttttatgaataatattctccgttcaatttactgattgtaccctactacttatatgtacaatattaaaatgaaaacaatatattgtgctgaataggtttatagcgacatctatgatagagcgccacaataacaaacaattgcgttttattattacaaatccaattttaaaaaaagcggcagaaccggtcaaacctaaaagactgattacataaatcttattcaaatttcaaaagtgccccaggggctagtatctacgacacaccgagcggcgaactaataacgctcactgaagggaactccggttccccgccggcgcgcatgggtgagattccttgaagttgagtattggccgtccgctctaccgaaagttacgggcaccattcaacccggtccagcacggcggccgggtaaccgacttgctgccccgagaattatgcagcatttttttggtgtatgtgggccccaaatgaagtgcaggtcaaaccttgacagtgacgacaaatcgttgggcgggtccagggcgaattttgcgacaacatgtcgaggctcagcaggaccggcatgcaagctagcttactagtgatattctatagtgtcacctaaatgtattctagaccaagcatgcacagctggcgttctcagccagatccaacgttacaccacaatatatcctgccaagatctaattccggggatcggaaatccagaagcccgagaggttgccgcctttcgggctttttctttttcaaaaaaaaaaatttataaaacgatctgttgcggccggccgccgggttgtgggcaaaggcgctcgacggtgggcaaccgcttgcggttgtccacgggcggagccggtgcgcgtagcgcattgtccacaagccaagggcgaccaataattgatatatatattcataattgaaaagctaattgaacatactacttgctgtaactacttgccggagcgaggggtgtttgcaagctgttgatctgaaagggctattagcgttctcacgtgcctttttgattagcgatttcacgtgaccttattagcgatttcacgtactccgattagcgatttcacgtaccctgattagcgatttcacgtggatagtttttggagcgggccggaaagccccgtgaatcaaggctttgcggggcattagcggtttcacgtggataactaccctctatccacaggcttccggggataaaaaagcccgctcgacggcgggctgttggatggggatcgcctgaatcgccccatcatccagccagaaagtgagggagccacggttgatgagagctttgttgtaggtggaccagttggtgattttgaacttttgctttgccacggaacggtctgcgttgtcgggaagatgcgtgatctgatccttcaactcagcaaaagttcgatttattcaacaaagccacgttgtgtctcaaaatctctgatgttacattgcacaagataaaaatatatcatcatgaacaataaaactgtctgcttacataaacagtaatacaaggggtgttatgagggaagcggtgatcgccgaagtatcgactcaactatcagaggtagttggcgtcatcgagcgccatctcgaaccgacgttgctggccgtacatttgtacggctccgcagtggatggcggcctgaagccacacagtgatattgatttgctggttacggtgaccgtaaggcttgatgaaacaacgcggcgagctttgatcaacgaccttttggaaacttcggcttcccctggagagagcgagattctccgcgctgtagaagtcaccattgttgtgcacgacgacatcattccgtggcgttatccagctaagcgcgaactgcaatttggagaatggcagcgcaatgacattcttgcaggtatcttcgagccagccacgatcgacattgatctggctatcttgctgacaaaagcaagagaacatagcgttgccttggtaggtccagcggcggaggaactctttgatccggttcctgaacaggatctatttgaggcgctaaatgaaaccttaacgctatggaactcgccgcccgactgggctggcgatgagcgaaatgtagtgcttacgttgtcccgcatttggtacagcgcagtaaccggcaaaatcgcgccgaaggatgtcgctgccgactgggcaatggagcgcctgccggcccagtatcagcccgtcatacttgaagctaggcaggcttatcttggacaagaagatcgcttggcctcgcgcgcagatcagttggaagaatttgttcactacgtgaaaggcgagatcaccaaggtagtcggcaaataatcactagaccaatgttacacatatatactttagattgatttaaaacttcatttttaatttaaaaggatctaggtgaagatcctttttgataatctcatgaccaaaatcccttaacgtgagttttcgttccactgagcgtcagaccccgtagaaaagatcaaaggatcttcttgagatcctttttttctgcgcgtaatctgctgcttgcaaacaaaaaaaccaccgctaccagcggtggtttgtttgccggatcaagagctaccaactcttcttccgaaggtaactggcttcagcagagcgcagataccaaatactgttcttctagtgtagccgtagttaggccaccacttcaagaactctgtagcaccgcctacatacctcgctctgctaatcctgttaccagtggctgctgccagtggcgataagtcgtgtcttaccgggttggactcaagacgatagttaccggataaggcgcagcggtcgggctgaacggggggttcgtgcacacagcccagcttggagcgaacgacctacaccgaactgagatacctacagcgtgagctatgagaaagcgccacgcttcccgaagggagaaaggcggacaggtatccggtaagcggcagggtcggaacaggagagcgcacgagggagcttccagggggaaacgcctggtatctttatagtcctgtcgggtttcgccacctctgacttgagcgtcgatttttgtgatgctcgtcaggggggcggagcctatggaaaaacgccagcaacgcggcctttttacggttcctggccttttgctggccttttgctcacatgagatctcaaacaaacacatacagcgacttagtttacccgccaatatatcctgtcaaggctcgaactaggctcggacgaagtaagcggccgcaaccttaattaaacacggcgcgccaacagcgatcgcaccaggtacc

SEQ ID NO: 266 - DNA, 6921 bp, synthetic construct
  misc_feature 1..6921: note = pAGS-0029 CAM 35S promoter
  source 1..6921: mol_type = other DNA
accttccattttgacatgtttcctagctagaaggaacagctattcatatgaattttccgaggtcacgctgtgatggatcgattcgttcccgtcacagacgcaagcagcgaggtgatggctggacgggcacgcgtcacaatttagaacaacccggactcttgtgacgcgagctccgggtgcggaaaaccctacggggtgaaaggagccgcagcttccacccatttacttgactgataacccagtacacacaacgctaccgtgacggaaatgccgcgcgctgtgaagccgtggtgaatctttcgctgctgctcgttctctccacacacacaacagtattcagtcgactggtaccaacaggctatggtgagcaagggcgaggagctgttcaccggggtggtgcccatcctggtcgagctggacggcgacgtaaacggccacaagttcagcgtgtccggcgagggcgagggcgatgccacctacggcaagctgaccctgaagttcatctgcaccaccggcaagctgcccgtgccctggcccaccctcgtgaccaccctgacctacggcgtgcagtgcttcagccgctaccccgaccacatgaagcagcacgacttcttcaagtccgccatgcccgaaggctacgtccaggagcgcaccatcttcttcaaggacgacggcaactacaagacccgcgccgaggtgaagttcgagggcgacaccctggtgaaccgcatcgagctgaagggcatcgacttcaaggaggacggcaacatcctggggcacaagctggagtacaactacaacagccacaacgtctatatcatggccgacaagcagaagaacggcatcaaggtgaacttcaagatccgccacaacatcgaggacggcagcgtgcagctcgccgaccactaccagcagaacacccccatcggcgacggccccgtgctgctgcccgacaaccactacctgagcacccagtccgccctgagcaaagaccccaacgagaagcgcgatcacatggtcctgctggagttcgtgaccgccgccgggatcactctcggcatggacgagctgtacaagtcaggtggatcctagataacctttaccttcattccctgtaaattggtaccctgcaaagctttcgttcgtatcatcggtttcgacaacgttcgtcaagttcaatgcatcagtttcattgcgcacacaccagaatcctactgagtttgagtattatggcattgggaaaactgtttttcttgtaccatttgttgtgcttgtaatttactgtgttttttattcggttttcgctatcgaactgtgaaatggaaatggatggagaagagttaatgaatgatatggtccttttgttcattctcaaattaatattatttgttttttctcttatttgttgtgtgttgaatttgaaattataagagatatgcaaacattttgttttgagtaaaaatgtgtcaaatcgtggcctctaatgaccgaagttaatatgaggagtaaaacacttgtagttgtaccattatgcttattcactaggcaacaaatatattttcagacctagaaaagctgcaaatgttactgaatacaagtatgtcctcttgtgttttagacatttatgaactttcctttatgtaattttccagaatccttgtcagattctaatcattgctttataattatagttatactcatggatttgtagttgagtatgaaaatattttttaatgcattttatgacttgccaattgattgacaacatgcatcaatcgactagtcgacgagtcagtaataaacggcgtcaaagtggttgcagccggcacacacgagtcgtgtttatcaactcaaagcacaaatacttttcctcaacctaaaaataaggcaattagccaaaaacaactttgcgtgtaaacaacgctcaatacacgtgtcattttattattagctattgcttcaccgccttagctttctcgtgacctagtcgtcctcgtcttttcttcttcttcttctataaaacaatacccaaagagctcttcttcttcacaattcagatttcaatttctcaaaatcttaaaaactttctctcaattctctctaccgtgatcaaggtaaatttctgtgttccttattctctcaaaatcttcgattttgttttcgttcgatcccaatttcgtatatgttctttggtttagattctgttaatcttagatcgaagacgattttctgggtttgatcgttagatatcatcttaattctcgattagggtttcatagatatcatccgatttgttcaaataatttgagttttgtcgaataattactcttcgatttgtgatttctatctagatctggtgttagtttctagtttgtgcgatcgaatttgtagattaatctgagtttttctgattaacaccacaccaatctggtaccagaaaaggggagaagcaaaaccatgggtaaaaagcctgaactcaccgcgacgtctgtcgagaagtttctgatcgaaaagttcgacagcgtctccgacctgatgcagctctcggagggcgaagaatctcgtgctttcagcttcgatgtaggagggcgtggatatgtcctgcgggtaaatagctgcgccgatggtttctacaaagatcgttatgtttatcggcactttgcatcggccgcgctcccgattccggaagtgcttgacattggggcattcagcgagagcctgacctattgcatctcccgccgtgcacagggtgtcacgttgcaagacctgcctgaaaccgaactgcccgctgttctgcaaccggtcgcggaggcgatggatgccatcgctgcggccgatcttagccagacgagcgggttcggcccattcggaccgcaaggaatcggtcaatacactacatggcgtgatttcatatgcgcgattgctgatccccatgtgtatcactggcaaactgtgatggacgacaccgtcagtgcgtccgtcgcgcaggctctcgatgagctgatgctttgggccgaggactgccccgaagtccggcacctcgtgcacgcggatttcggctccaacaatgtcctgacggacaatggccgcataacagcggtcattgactggagcgaggcgatgttcggggattcccaatacgaggtcgccaacatcttcttctggaggccgtggttggcttgtatggagcagcagacgcgctacttcgagcggaggcatccggagcttgcaggatcgccgcggctccgggcgtatatgctccgcattggtcttgaccaactctatcagagcttggttgacggcaatttcgatgatgcagcttgggcgcagggtcgatgcgacgcaatcgtccgatccggagccgggactgtcgggcgtacacaaatcgcccgcagaagcgcggccgtctggaccgatggctgtgtagaagtactcgccgatagtggaaaccgacgccccagcactcgtccgagggcaaaggaatagatgcatcctgctttaatgagatatgcgagacgcctatgatcgcatgatatttgctttcaattctgttgtgcacgttgtaaaaaacctgagcatgtgtagctcagatccttaccgccggtttcggttcattctaatgaatatatcacccgttactatcgtatttttatgaataatattctccgttcaatttactgattgtaccctactacttatatgtacaatattaaaatgaaaacaatatattgtgctgaataggtttatagcgacatctatgatagagcgccacaataacaaacaattgcgttttattattacaaatccaattttaaaaaaagcggcagaaccggtcaaacctaaaagactgattacataaatcttattcaaatttcaaaagtgccccaggggctagtatctacgacacaccgagcggcgaactaataacgctcactgaagggaactccggttccccgccggcgcgcatgggtgagattccttgaagttgagtattggccgtccgctctaccgaaagttacgggcaccattcaacccggtccagcacggcggccgggtaaccgacttgctgccccgagaattatgcagcatttttttggtgtatgtgggccccaaatgaagtgcaggtcaaaccttgacagtgacgacaaatcgttgggcgggtccagggcgaattttgcgacaacatgtcgaggctcagcaggaccggcatgcaagctagcttactagtgatattctatagtgtcacctaaatgtattctagaccaagcatgcacagctggcgttctcagccagatccaacgttacaccacaatatatcctgccaagatctaattccggggatcggaaatccagaagcccgagaggttgccgcctttcgggctttttctttttcaaaaaaaaaaatttataaaacgatctgttgcggccggccgccgggttgtgggcaaaggcgctcgacggtgggcaaccgcttgcggttgtccacgggcggagccggtgcgcgtagcgcattgtccacaagccaagggcgaccaataattgatatatatattcataattgaaaagctaattgaacatactacttgctgtaactacttgccggagcgaggggtgtttgcaagctgttgatctgaaagggctattagcgttctcacgtgcctttttgattagcgatttcacgtgaccttattagcgatttcacgtactccgattagcgatttcacgtaccctgattagcgatttcacgtggatagtttttggagcgggccggaaagccccgtgaatcaaggctttgcggggcattagcggtttcacgtggataactaccctctatccacaggcttccggggataaaaaagcccgctcgacggcgggctgttggatggggatcgcctgaatcgccccatcatccagccagaaagtgagggagccacggttgatgagagctttgttgtaggtggaccagttggtgattttgaacttttgctttgccacggaacggtctgcgttgtcgggaagatgcgtgatctgatccttcaactcagcaaaagttcgatttattcaacaaagccacgttgtgtctcaaaatctctgatgttacattgcacaagataaaaatatatcatcatgaacaataaaactgtctgcttacataaacagtaatacaaggggtgttatgagggaagcggtgatcgccgaagtatcgactcaactatcagaggtagttggcgtcatcgagcgccatctcgaaccgacgttgctggccgtacatttgtacggctccgcagtggatggcggcctgaagccacacagtgatattgatttgctggttacggtgaccgtaaggcttgatgaaacaacgcggcgagctttgatcaacgaccttttggaaacttcggcttcccctggagagagcgagattctccgcgctgtagaagtcaccattgttgtgcacgacgacatcattccgtggcgttatccagctaagcgcgaactgcaatttggagaatggcagcgcaatgacattcttgcaggtatcttcgagccagccacgatcgacattgatctggctatcttgctgacaaaagcaagagaacatagcgttgccttggtaggtccagcggcggaggaactctttgatccggttcctgaacaggatctatttgaggcgctaaatgaaaccttaacgctatggaactcgccgcccgactgggctggcgatgagcgaaatgtagtgcttacgttgtcccgcatttggtacagcgcagtaaccggcaaaatcgcgccgaaggatgtcgctgccgactgggcaatggagcgcctgccggcccagtatcagcccgtcatacttgaagctaggcaggcttatcttggacaagaagatcgcttggcctcgcgcgcagatcagttggaagaatttgttcactacgtgaaaggcgagatcaccaaggtagtcggcaaataatcactagaccaatgttacacatatatactttagattgatttaaaacttcatttttaatttaaaaggatctaggtgaagatcctttttgataatctcatgaccaaaatcccttaacgtgagttttcgttccactgagcgtcagaccccgtagaaaagatcaaaggatcttcttgagatcctttttttctgcgcgtaatctgctgcttgcaaacaaaaaaaccaccgctaccagcggtggtttgtttgccggatcaagagctaccaactcttcttccgaaggtaactggcttcagcagagcgcagataccaaatactgttcttctagtgtagccgtagttaggccaccacttcaagaactctgtagcaccgcctacatacctcgctctgctaatcctgttaccagtggctgctgccagtggcgataagtcgtgtcttaccgggttggactcaagacgatagttaccggataaggcgcagcggtcgggctgaacggggggttcgtgcacacagcccagcttggagcgaacgacctacaccgaactgagatacctacagcgtgagctatgagaaagcgccacgcttcccgaagggagaaaggcggacaggtatccggtaagcggcagggtcggaacaggagagcgcacgagggagcttccagggggaaacgcctggtatctttatagtcctgtcgggtttcgccacctctgacttgagcgtcgatttttgtgatgctcgtcaggggggcggagcctatggaaaaacgccagcaacgcggcctttttacggttcctggccttttgctggccttttgctcacatgagatctcaaacaaacacatacagcgacttagtttacccgccaatatatcctgtcaaggctcgaactaggctcggacgaagtaagcggccgcaaccttaattaaacacggcgcgccaacagcgatcgcaccaggtacc

SEQ ID NO: 267 - DNA, 7247 bp, synthetic construct
  misc_feature 1..7247: note = pAGS-0030 MAS promoter
  source 1..7247: mol_type = other DNA
acctgcaatctcacgcaccaggcgctggaagggcaacttgcggatgagaaggtccgtggacttctggtaacgacggatctcacgcagagcgacggttccagggcgataacggtggggcttcttgactcctccggtagccggagcggacttacgggcagccttggtggcaagctgcttgcgcggcgctttgcctccggtggatttacgggcggtttgcttggttcgggccattttgacggttttttttacaagagaagagttcttgaaatttgtgaggttaaagtgtgtggcttccgccgtagtcaaggagcgtgcggttgccgatcgcaccggtacgttctgtagaaatgaacacagtgtgttgaattgaaagtatggcgcaggtatggtgtgtgataagtagcagccgcgccgagacaaacaaactttggtttctacgacaatctctgtagacaagtactagaaacccgtttgaacgagcataaatctgcaccggcaggccaccagacatcgtttcaacgtaatattctacgtaaccattttatcccaggaaacctacggcctgtgaaccactgaaaggaagcactcacaattcgctctcggcaacaaccgacaatagtcttactcacagtcaataccgaaaacaaacaacagaacagtattcagtcgactggtaccaacaggctatggtgagcaagggcgaggagctgttcaccggggtggtgcccatcctggtcgagctggacggcgacgtaaacggccacaagttcagcgtgtccggcgagggcgagggcgatgccacctacggcaagctgaccctgaagttcatctgcaccaccggcaagctgcccgtgccctggcccaccctcgtgaccaccctgacctacggcgtgcagtgcttcagccgctaccccgaccacatgaagcagcacgacttcttcaagtccgccatgcccgaaggctacgtccaggagcgcaccatcttcttcaaggacgacggcaactacaagacccgcgccgaggtgaagttcgagggcgacaccctggtgaaccgcatcgagctgaagggcatcgacttcaaggaggacggcaacatcctggggcacaagctggagtacaactacaacagccacaacgtctatatcatggccgacaagcagaagaacggcatcaaggtgaacttcaagatccgccacaacatcgaggacggcagcgtgcagctcgccgaccactaccagcagaacacccccatcggcgacggccccgtgctgctgcccgacaaccactacctgagcacccagtccgccctgagcaaagaccccaacgagaagcgcgatcacatggtcctgctggagttcgtgaccgccgccgggatcactctcggcatggacgagctgtacaagtcaggtggatcctagataacctttaccttcattccctgtaaattggtaccctgcaaagctttcgttcgtatcatcggtttcgacaacgttcgtcaagttcaatgcatcagtttcattgcgcacacaccagaatcctactgagtttgagtattatggcattgggaaaactgtttttcttgtaccatttgttgtgcttgtaatttactgtgttttttattcggttttcgctatcgaactgtgaaatggaaatggatggagaagagttaatgaatgatatggtccttttgttcattctcaaattaatattatttgttttttctcttatttgttgtgtgttgaatttgaaattataagagatatgcaaacattttgttttgagtaaaaatgtgtcaaatcgtggcctctaatgaccgaagttaatatgaggagtaaaacacttgtagttgtaccattatgcttattcactaggcaacaaatatattttcagacctagaaaagctgcaaatgttactgaatacaagtatgtcctcttgtgttttagacatttatgaactttcctttatgtaattttccagaatccttgtcagattctaatcattgctttataattatagttatactcatggatttgtagttgagtatgaaaatattttttaatgcattttatgacttgccaattgattgacaacatgcatcaatcgactagtcgacgagtcagtaataaacggcgtcaaagtggttgcagccggcacacacgagtcgtgtttatcaactcaaagcacaaatacttttcctcaacctaaaaataaggcaattagccaaaaacaactttgcgtgtaaacaacgctcaatacacgtgtcattttattattagctattgcttcaccgccttagctttctcgtgacctagtcgtcctcgtcttttcttcttcttcttctataaaacaatacccaaagagctcttcttcttcacaattcagatttcaatttctcaaaatcttaaaaactttctctcaattctctctaccgtgatcaaggtaaatttctgtgttccttattctctcaaaatcttcgattttgttttcgttcgatcccaatttcgtatatgttctttggtttagattctgttaatcttagatcgaagacgattttctgggtttgatcgttagatatcatcttaattctcgattagggtttcatagatatcatccgatttgttcaaataatttgagttttgtcgaataattactcttcgatttgtgatttctatctagatctggtgttagtttctagtttgtgcgatcgaatttgtagattaatctgagtttttctgattaacaccacaccaatctggtaccagaaaaggggagaagcaaaaccatgggtaaaaagcctgaactcaccgcgacgtctgtcgagaagtttctgatcgaaaagttcgacagcgtctccgacctgatgcagctctcggagggcgaagaatctcgtgctttcagcttcgatgtaggagggcgtggatatgtcctgcgggtaaatagctgcgccgatggtttctacaaagatcgttatgtttatcggcactttgcatcggccgcgctcccgattccggaagtgcttgacattggggcattcagcgagagcctgacctattgcatctcccgccgtgcacagggtgtcacgttgcaagacctgcctgaaaccgaactgcccgctgttctgcaaccggtcgcggaggcgatggatgccatcgctgcggccgatcttagccagacgagcgggttcggcccattcggaccgcaaggaatcggtcaatacactacatggcgtgatttcatatgcgcgattgctgatccccatgtgtatcactggcaaactgtgatggacgacaccgtcagtgcgtccgtcgcgcaggctctcgatgagctgatgctttgggccgaggactgccccgaagtccggcacctcgtgcacgcggatttcggctccaacaatgtcctgacggacaatggccgcataacagcggtcattgactggagcgaggcgatgttcggggattcccaatacgaggtcgccaacatcttcttctggaggccgtggttggcttgtatggagcagcagacgcgctacttcgagcggaggcatccggagcttgcaggatcgccgcggctccgggcgtatatgctccgcattggtcttgaccaactctatcagagcttggttgacggcaatttcgatgatgcagcttgggcgcagggtcgatgcgacgcaatcgtccgatccggagccgggactgtcgggcgtacacaaatcgcccgcagaagcgcggccgtctggaccgatggctgtgtagaagtactcgccgatagtggaaaccgacgccccagcactcgtccgagggcaaaggaatagatgcatcctgctttaatgagatatgcgagacgcctatgatcgcatgatatttgctttcaattctgttgtgcacgttgtaaaaaacctgagcatgtgtagctcagatccttaccgccggtttcggttcattctaatgaatatatcacccgttactatcgtatttttatgaataatattctccgttcaatttactgattgtaccctactacttatatgtacaatattaaaatgaaaacaatatattgtgctgaataggtttatagcgacatctatgatagagcgccacaataacaaacaattgcgttttattattacaaatccaattttaaaaaaagcggcagaaccggtcaaacctaaaagactgattacataaatcttattcaaatttcaaaagtgccccaggggctagtatctacgacacaccgagcggcgaactaataacgctcactgaagggaactccggttccccgccggcgcgcatgggtgagattccttgaagttgagtattggccgtccgctctaccgaaagttacgggcaccattcaacccggtccagcacggcggccgggtaaccgacttgctgccccgagaattatgcagcatttttttggtgtatgtgggccccaaatgaagtgcaggtcaaaccttgacagtgacgacaaatcgttgggcgggtccagggcgaattttgcgacaacatgtcgaggctcagcaggaccggcatgcaagctagcttactagtgatattctatagtgtcacctaaatgtattctagaccaagcatgcacagctggcgttctcagccagatccaacgttacaccacaatatatcctgccaagatctaattccggggatcggaaatccagaagcccgagaggttgccgcctttcgggctttttctttttcaaaaaaaaaaatttataaaacgatctgttgcggccggccgccgggttgtgggcaaaggcgctcgacggtgggcaaccgcttgcggttgtccacgggcggagccggtgcgcgtagcgcattgtccacaagccaagggcgaccaataattgatatatatattcataattgaaaagctaattgaacatactacttgctgtaactacttgccggagcgaggggtgtttgcaagctgttgatctgaaagggctattagcgttctcacgtgcctttttgattagcgatttcacgtgaccttattagcgatttcacgtactccgattagcgatttcacgtaccctgattagcgatttcacgtggatagtttttggagcgggccggaaagccccgtgaatcaaggctttgcggggcattagcggtttcacgtggataactaccctctatccacaggcttccggggataaaaaagcccgctcgacggcgggctgttggatggggatcgcctgaatcgccccatcatccagccagaaagtgagggagccacggttgatgagagctttgttgtaggtggaccagttggtgattttgaacttttgctttgccacggaacggtctgcgttgtcgggaagatgcgtgatctgatccttcaactcagcaaaagttcgatttattcaacaaagccacgttgtgtctcaaaatctctgatgttacattgcacaagataaaaatatatcatcatgaacaataaaactgtctgcttacataaacagtaatacaaggggtgttatgagggaagcggtgatcgccgaagtatcgactcaactatcagaggtagttggcgtcatcgagcgccatctcgaaccgacgttgctggccgtacatttgtacggctccgcagtggatggcggcctgaagccacacagtgatattgatttgctggttacggtgaccgtaaggcttgatgaaacaacgcggcgagctttgatcaacgaccttttggaaacttcggcttcccctggagagagcgagattctccgcgctgtagaagtcaccattgttgtgcacgacgacatcattccgtggcgttatccagctaagcgcgaactgcaatttggagaatggcagcgcaatgacattcttgcaggtatcttcgagccagccacgatcgacattgatctggctatcttgctgacaaaagcaagagaacatagcgttgccttggtaggtccagcggcggaggaactctttgatccggttcctgaacaggatctatttgaggcgctaaatgaaaccttaacgctatggaactcgccgcccgactgggctggcgatgagcgaaatgtagtgcttacgttgtcccgcatttggtacagcgcagtaaccggcaaaatcgcgccgaaggatgtcgctgccgactgggcaatggagcgcctgccggcccagtatcagcccgtcatacttgaagctaggcaggcttatcttggacaagaagatcgcttggcctcgcgcgcagatcagttggaagaatttgttcactacgtgaaaggcgagatcaccaaggtagtcggcaaataatcactagaccaatgttacacatatatactttagattgatttaaaacttcatttttaatttaaaaggatctaggtgaagatcctttttgataatctcatgaccaaaatcccttaacgtgagttttcgttccactgagcgtcagaccccgtagaaaagatcaaaggatcttcttgagatcctttttttctgcgcgtaatctgctgcttgcaaacaaaaaaaccaccgctaccagcggtggtttgtttgccggatcaagagctaccaactcttcttccgaaggtaactggcttcagcagagcgcagataccaaatactgttcttctagtgtagccgtagttaggccaccacttcaagaactctgtagcaccgcctacatacctcgctctgctaatcctgttaccagtggctgctgccagtggcgataagtcgtgtcttaccgggttggactcaagacgatagttaccggataaggcgcagcggtcgggctgaacggggggttcgtgcacacagcccagcttggagcgaacgacctacaccgaactgagatacctacagcgtgagctatgagaaagcgccacgcttcccgaagggagaaaggcggacaggtatccggtaagcggcagggtcggaacaggagagcgcacgagggagcttccagggggaaacgcctggtatctttatagtcctgtcgggtttcgccacctctgacttgagcgtcgatttttgtgatgctcgtcaggggggcggagcctatggaaaaacgccagcaacgcggcctttttacggttcctggccttttgctggccttttgctcacatgagatctcaaacaaacacatacagcgacttagtttacccgccaatatatcctgtcaaggctcgaactaggctcggacgaagtaagcggccgcaaccttaattaaacacggcgcgccaacagcgatcgcaccaggtacc

SEQ ID NO: 268 - DNA, 6737 bp, synthetic construct
  misc_feature 1..6737: note = pAGS-0031 PAR promoter
  source 1..6737: mol_type = other DNA
acctgctgcaggacgcaatggaggattatcaccgcaaaaatgaacttcgaaaaaaactttcgagcgaccatggaaaaggaggatcagattcagattacaacagtggattgctctggtagcaaatatcttctgctagattggctcaacagtattcagtcgactggtaccaacaggctatggtgagcaagggcgaggagctgttcaccggggtggtgcccatcctggtcgagctggacggcgacgtaaacggccacaagttcagcgtgtccggcgagggcgagggcgatgccacctacggcaagctgaccctgaagttcatctgcaccaccggcaagctgcccgtgccctggcccaccctcgtgaccaccctgacctacggcgtgcagtgcttcagccgctaccccgaccacatgaagcagcacgacttcttcaagtccgccatgcccgaaggctacgtccaggagcgcaccatcttcttcaaggacgacggcaactacaagacccgcgccgaggtgaagttcgagggcgacaccctggtgaaccgcatcgagctgaagggcatcgacttcaaggaggacggcaacatcctggggcacaagctggagtacaactacaacagccacaacgtctatatcatggccgacaagcagaagaacggcatcaaggtgaacttcaagatccgccacaacatcgaggacggcagcgtgcagctcgccgaccactaccagcagaacacccccatcggcgacggccccgtgctgctgcccgacaaccactacctgagcacccagtccgccctgagcaaagaccccaacgagaagcgcgatcacatggtcctgctggagttcgtgaccgccgccgggatcactctcggcatggacgagctgtacaagtcaggtggatcctagataacctttaccttcattccctgtaaattggtaccctgcaaagctttcgttcgtatcatcggtttcgacaacgttcgtcaagttcaatgcatcagtttcattgcgcacacaccagaatcctactgagtttgagtattatggcattgggaaaactgtttttcttgtaccatttgttgtgcttgtaatttactgtgttttttattcggttttcgctatcgaactgtgaaatggaaatggatggagaagagttaatgaatgatatggtccttttgttcattctcaaattaatattatttgttttttctcttatttgttgtgtgttgaatttgaaattataagagatatgcaaacattttgttttgagtaaaaatgtgtcaaatcgtggcctctaatgaccgaagttaatatgaggagtaaaacacttgtagttgtaccattatgcttattcactaggcaacaaatatattttcagacctagaaaagctgcaaatgttactgaatacaagtatgtcctcttgtgttttagacatttatgaactttcctttatgtaattttccagaatccttgtcagattctaatcattgctttataattatagttatactcatggatttgtagttgagtatgaaaatattttttaatgcattttatgacttgccaattgattgacaacatgcatcaatcgactagtcgacgagtcagtaataaacggcgtcaaagtggttgcagccggcacacacgagtcgtgtttatcaactcaaagcacaaatacttttcctcaacctaaaaataaggcaattagccaaaaacaactttgcgtgtaaacaacgctcaatacacgtgtcattttattattagctattgcttcaccgccttagctttctcgtgacctagtcgtcctcgtcttttcttcttcttcttctataaaacaatacccaaagagctcttcttcttcacaattcagatttcaatttctcaaaatcttaaaaactttctctcaattctctctaccgtgatcaaggtaaatttctgtgttccttattctctcaaaatcttcgattttgttttcgttcgatcccaatttcgtatatgttctttggtttagattctgttaatcttagatcgaagacgattttctgggtttgatcgttagatatcatcttaattctcgattagggtttcatagatatcatccgatttgttcaaataatttgagttttgtcgaataattactcttcgatttgtgatttctatctagatctggtgttagtttctagtttgtgcgatcgaatttgtagattaatctgagtttttctgattaacaccacaccaatctggtaccagaaaaggggagaagcaaaaccatgggtaaaaagcctgaactcaccgcgacgtctgtcgagaagtttctgatcgaaaagttcgacagcgtctccgacctgatgcagctctcggagggcgaagaatctcgtgctttcagcttcgatgtaggagggcgtggatatgtcctgcgggtaaatagctgcgccgatggtttctacaaagatcgttatgtttatcggcactttgcatcggccgcgctcccgattccggaagtgcttgacattggggcattcagcgagagcctgacctattgcatctcccgccgtgcacagggtgtcacgttgcaagacctgcctgaaaccgaactgcccgctgttctgcaaccggtcgcggaggcgatggatgccatcgctgcggccgatcttagccagacgagcgggttcggcccattcggaccgcaaggaatcggtcaatacactacatggcgtgatttcatatgcgcgattgctgatccccatgtgtatcactggcaaactgtgatggacgacaccgtcagtgcgtccgtcgcgcaggctctcgatgagctgatgctttgggccgaggactgccccgaagtccggcacctcgtgcacgcggatttcggctccaacaatgtcctgacggacaatggccgcataacagcggtcattgactggagcgaggcgatgttcggggattcccaatacgaggtcgccaacatcttcttctggaggccgtggttggcttgtatggagcagcagacgcgctacttcgagcggaggcatccggagcttgcaggatcgccgcggctccgggcgtatatgctccgcattggtcttgaccaactctatcagagcttggttgacggcaatttcgatgatgcagcttgggcgcagggtcgatgcgacgcaatcgtccgatccggagccgggactgtcgggcgtacacaaatcgcccgcagaagcgcggccgtctggaccgatggctgtgtagaagtactcgccgatagtggaaaccgacgccccagcactcgtccgagggcaaaggaatagatgcatcctgctttaatgagatatgcgagacgcctatgatcgcatgatatttgctttcaattctgttgtgcacgttgtaaaaaacctgagcatgtgtagctcagatccttaccgccggtttcggttcattctaatgaatatatcacccgttactatcgtatttttatgaataatattctccgttcaatttactgattgtaccctactacttatatgtacaatattaaaatgaaaacaatatattgtgctgaataggtttatagcgacatctatgatagagcgccacaataacaaacaattgcgttttattattacaaatccaattttaaaaaaagcggcagaaccggtcaaacctaaaagactgattacataaatcttattcaaatttcaaaagtgccccaggggctagtatctacgacacaccgagcggcgaactaataacgctcactgaagggaactccggttccccgccggcgcgcatgggtgagattccttgaagttgagtattggccgtccgctctaccgaaagttacgggcaccattcaacccggtccagcacggcggccgggtaaccgacttgctgccccgagaattatgcagcatttttttggtgtatgtgggccccaaatgaagtgcaggtcaaaccttgacagtgacgacaaatcgttgggcgggtccagggcgaattttgcgacaacatgtcgaggctcagcaggaccggcatgcaagctagcttactagtgatattctatagtgtcacctaaatgtattctagaccaagcatgcacagctggcgttctcagccagatccaacgttacaccacaatatatcctgccaagatctaattccggggatcggaaatccagaagcccgagaggttgccgcctttcgggctttttctttttcaaaaaaaaaaatttataaaacgatctgttgcggccggccgccgggttgtgggcaaaggcgctcgacggtgggcaaccgcttgcggttgtccacgggcggagccggtgcgcgtagcgcattgtccacaagccaagggcgaccaataattgatatatatattcataattgaaaagctaattgaacatactacttgctgtaactacttgccggagcgaggggtgtttgcaagctgttgatctgaaagggctattagcgttctcacgtgcctttttgattagcgatttcacgtgaccttattagcgatttcacgtactccgattagcgatttcacgtaccctgattagcgatttcacgtggatagtttttggagcgggccggaaagccccgtgaatcaaggctttgcggggcattagcggtttcacgtggataactaccctctatccacaggcttccggggataaaaaagcccgctcgacggcgggctgttggatggggatcgcctgaatcgccccatcatccagccagaaagtgagggagccacggttgatgagagctttgttgtaggtggaccagttggtgattttgaacttttgctttgccacggaacggtctgcgttgtcgggaagatgcgtgatctgatccttcaactcagcaaaagttcgatttattcaacaaagccacgttgtgtctcaaaatctctgatgttacattgcacaagataaaaatatatcatcatgaacaataaaactgtctgcttacataaacagtaatacaaggggtgttatgagggaagcggtgatcgccgaagtatcgactcaactatcagaggtagttggcgtcatcgagcgccatctcgaaccgacgttgctggccgtacatttgtacggctccgcagtggatggcggcctgaagccacacagtgatattgatttgctggttacggtgaccgtaaggcttgatgaaacaacgcggcgagctttgatcaacgaccttttggaaacttcggcttcccctggagagagcgagattctccgcgctgtagaagtcaccattgttgtgcacgacgacatcattccgtggcgttatccagctaagcgcgaactgcaatttggagaatggcagcgcaatgacattcttgcaggtatcttcgagccagccacgatcgacattgatctggctatcttgctgacaaaagcaagagaacatagcgttgccttggtaggtccagcggcggaggaactctttgatccggttcctgaacaggatctatttgaggcgctaaatgaaaccttaacgctatggaactcgccgcccgactgggctggcgatgagcgaaatgtagtgcttacgttgtcccgcatttggtacagcgcagtaaccggcaaaatcgcgccgaaggatgtcgctgccgactgggcaatggagcgcctgccggcccagtatcagcccgtcatacttgaagctaggcaggcttatcttggacaagaagatcgcttggcctcgcgcgcagatcagttggaagaatttgttcactacgtgaaaggcgagatcaccaaggtagtcggcaaataatcactagaccaatgttacacatatatactttagattgatttaaaacttcatttttaatttaaaaggatctaggtgaagatcctttttgataatctcatgaccaaaatcccttaacgtgagttttcgttccactgagcgtcagaccccgtagaaaagatcaaaggatcttcttgagatcctttttttctgcgcgtaatctgctgcttgcaaacaaaaaaaccaccgctaccagcggtggtttgtttgccggatcaagagctaccaactcttcttccgaaggtaactggcttcagcagagcgcagataccaaatactgttcttctagtgtagccgtagttaggccaccacttcaagaactctgtagcaccgcctacatacctcgctctgctaatcctgttaccagtggctgctgccagtggcgataagtcgtgtcttaccgggttggactcaagacgatagttaccggataaggcgcagcggtcgggctgaacggggggttcgtgcacacagcccagcttggagcgaacgacctacaccgaactgagatacctacagcgtgagctatgagaaagcgccacgcttcccgaagggagaaaggcggacaggtatccggtaagcggcagggtcggaacaggagagcgcacgagggagcttccagggggaaacgcctggtatctttatagtcctgtcgggtttcgccacctctgacttgagcgtcgatttttgtgatgctcgtcaggggggcggagcctatggaaaaacgccagcaacgcggcctttttacggttcctggccttttgctggccttttgctcacatgagatctcaaacaaacacatacagcgacttagtttacccgccaatatatcctgtcaaggctcgaactaggctcggacgaagtaagcggccgcaaccttaattaaacacggcgcgccaacagcgatcgcaccaggtacc

SEQ ID NO: 269 - DNA, 6860 bp, synthetic construct
  misc_feature 1..6860: note = pAGS-0032 Cv PAS D promoter
  source 1..6860: mol_type = other DNA
acctactacgttagagcgctaacgagaatacttcatataccgtattttttacgataataataatgtaatgtgaaattgctatccaaaaggcacctaattttgtccaccgttcaaaggaaaggacaaggaagtagtagcgtgtaggtttggtgctgtacaaaataagcaagacacgtgttgccttattataggataatccataaggcaatttcgtcttaagtcggccattgcacctttaaaaggagcctctttgttcccaaaatcttcaacagtattcagtcgactggtaccaacaggctatggtgagcaagggcgaggagctgttcaccggggtggtgcccatcctggtcgagctggacggcgacgtaaacggccacaagttcagcgtgtccggcgagggcgagggcgatgccacctacggcaagctgaccctgaagttcatctgcaccaccggcaagctgcccgtgccctggcccaccctcgtgaccaccctgacctacggcgtgcagtgcttcagccgctaccccgaccacatgaagcagcacgacttcttcaagtccgccatgcccgaaggctacgtccaggagcgcaccatcttcttcaaggacgacggcaactacaagacccgcgccgaggtgaagttcgagggcgacaccctggtgaaccgcatcgagctgaagggcatcgacttcaaggaggacggcaacatcctggggcacaagctggagtacaactacaacagccacaacgtctatatcatggccgacaagcagaagaacggcatcaaggtgaacttcaagatccgccacaacatcgaggacggcagcgtgcagctcgccgaccactaccagcagaacacccccatcggcgacggccccgtgctgctgcccgacaaccactacctgagcacccagtccgccctgagcaaagaccccaacgagaagcgcgatcacatggtcctgctggagttcgtgaccgccgccgggatcactctcggcatggacgagctgtacaagtcaggtggatcctagataacctttaccttcattccctgtaaattggtaccctgcaaagctttcgttcgtatcatcggtttcgacaacgttcgtcaagttcaatgcatcagtttcattgcgcacacaccagaatcctactgagtttgagtattatggcattgggaaaactgtttttcttgtaccatttgttgtgcttgtaatttactgtgttttttattcggttttcgctatcgaactgtgaaatggaaatggatggagaagagttaatgaatgatatggtccttttgttcattctcaaattaatattatttgttttttctcttatttgttgtgtgttgaatttgaaattataagagatatgcaaacattttgttttgagtaaaaatgtgtcaaatcgtggcctctaatgaccgaagttaatatgaggagtaaaacacttgtagttgtaccattatgcttattcactaggcaacaaatatattttcagacctagaaaagctgcaaatgttactgaatacaagtatgtcctcttgtgttttagacatttatgaactttcctttatgtaattttccagaatccttgtcagattctaatcattgctttataattatagttatactcatggatttgtagttgagtatgaaaatattttttaatgcattttatgacttgccaattgattgacaacatgcatcaatcgactagtcgacgagtcagtaataaacggcgtcaaagtggttgcagccggcacacacgagtcgtgtttatcaactcaaagcacaaatacttttcctcaacctaaaaataaggcaattagccaaaaacaactttgcgtgtaaacaacgctcaatacacgtgtcattttattattagctattgcttcaccgccttagctttctcgtgacctagtcgtcctcgtcttttcttcttcttcttctataaaacaatacccaaagagctcttcttcttcacaattcagatttcaatttctcaaaatcttaaaaactttctctcaattctctctaccgtgatcaaggtaaatttctgtgttccttattctctcaaaatcttcgattttgttttcgttcgatcccaatttcgtatatgttctttggtttagattctgttaatcttagatcgaagacgattttctgggtttgatcgttagatatcatcttaattctcgattagggtttcatagatatcatccgatttgttcaaataatttgagttttgtcgaataattactcttcgatttgtgatttctatctagatctggtgttagtttctagtttgtgcgatcgaatttgtagattaatctgagtttttctgattaacaccacaccaatctggtaccagaaaaggggagaagcaaaaccatgggtaaaaagcctgaactcaccgcgacgtctgtcgagaagtttctgatcgaaaagttcgacagcgtctccgacctgatgcagctctcggagggcgaagaatctcgtgctttcagcttcgatgtaggagggcgtggatatgtcctgcgggtaaatagctgcgccgatggtttctacaaagatcgttatgtttatcggcactttgcatcggccgcgctcccgattccggaagtgcttgacattggggcattcagcgagagcctgacctattgcatctcccgccgtgcacagggtgtcacgttgcaagacctgcctgaaaccgaactgcccgctgttctgcaaccggtcgcggaggcgatggatgccatcgctgcggccgatcttagccagacgagcgggttcggcccattcggaccgcaaggaatcggtcaatacactacatggcgtgatttcatatgcgcgattgctgatccccatgtgtatcactggcaaactgtgatggacgacaccgtcagtgcgtccgtcgcgcaggctctcgatgagctgatgctttgggccgaggactgccccgaagtccggcacctcgtgcacgcggatttcggctccaacaatgtcctgacggacaatggccgcataacagcggtcattgactggagcgaggcgatgttcggggattcccaatacgaggtcgccaacatcttcttctggaggccgtggttggcttgtatggagcagcagacgcgctacttcgagcggaggcatccggagcttgcaggatcgccgcggctccgggcgtatatgctccgcattggtcttgaccaactctatcagagcttggttgacggcaatttcgatgatgcagcttgggcgcagggtcgatgcgacgcaatcgtccgatccggagccgggactgtcgggcgtacacaaatcgcccgcagaagcgcggccgtctggaccgatggctgtgtagaagtactcgccgatagtggaaaccgacgccccagcactcgtccgagggcaaaggaatagatgcatcctgctttaatgagatatgcgagacgcctatgatcgcatgatatttgctttcaattctgttgtgcacgttgtaaaaaacctgagcatgtgtagctcagatccttaccgccggtttcggttcattctaatgaatatatcacccgttactatcgtatttttatgaataatattctccgttcaatttactgattgtaccctactacttatatgtacaatattaaaatgaaaacaatatattgtgctgaataggtttatagcgacatctatgatagagcgccacaataacaaacaattgcgttttattattacaaatccaattttaaaaaaagcggcagaaccggtcaaacctaaaagactgattacataaatcttattcaaatttcaaaagtgccccaggggctagtatctacgacacaccgagcggcgaactaataacgctcactgaagggaactccggttccccgccggcgcgcatgggtgagattccttgaagttgagtattggccgtccgctctaccgaaagttacgggcaccattcaacccggtccagcacggcggccgggtaaccgacttgctgccccgagaattatgcagcatttttttggtgtatgtgggccccaaatgaagtgcaggtcaaaccttgacagtgacgacaaatcgttgggcgggtccagggcgaattttgcgacaacatgtcgaggctcagcaggaccggcatgcaagctagcttactagtgatattctatagtgtcacctaaatgtattctagaccaagcatgcacagctggcgttctcagccagatccaacgttacaccacaatatatcctgccaagatctaattccggggatcggaaatccagaagcccgagaggttgccgcctttcgggctttttctttttcaaaaaaaaaaatttataaaacgatctgttgcggccggccgccgggttgtgggcaaaggcgctcgacggtgggcaaccgcttgcggttgtccacgggcggagccggtgcgcgtagcgcattgtccacaagccaagggcgaccaataattgatatatatattcataattgaaaagctaattgaacatactacttgctgtaactacttgccggagcgaggggtgtttgcaagctgttgatctgaaagggctattagcgttctcacgtgcctttttgattagcgatttcacgtgaccttattagcgatttcacgtactccgattagcgatttcacgtaccctgattagcgatttcacgtggatagtttttggagcgggccggaaagccccgtgaatcaaggctttgcggggcattagcggtttcacgtggataactaccctctatccacaggcttccggggataaaaaagcccgctcgacggcgggctgttggatggggatcgcctgaatcgccccatcatccagccagaaagtgagggagccacggttgatgagagctttgttgtaggtggaccagttggtgattttgaacttttgctttgccacggaacggtctgcgttgtcgggaagatgcgtgatctgatccttcaactcagcaaaagttcgatttattcaacaaagccacgttgtgtctcaaaatctctgatgttacattgcacaagataaaaatatatcatcatgaacaataaaactgtctgcttacataaacagtaatacaaggggtgttatgagggaagcggtgatcgccgaagtatcgactcaactatcagaggtagttggcgtcatcgagcgccatctcgaaccgacgttgctggccgtacatttgtacggctccgcagtggatggcggcctgaagccacacagtgatattgatttgctggttacggtgaccgtaaggcttgatgaaacaacgcggcgagctttgatcaacgaccttttggaaacttcggcttcccctggagagagcgagattctccgcgctgtagaagtcaccattgttgtgcacgacgacatcattccgtggcgttatccagctaagcgcgaactgcaatttggagaatggcagcgcaatgacattcttgcaggtatcttcgagccagccacgatcgacattgatctggctatcttgctgacaaaagcaagagaacatagcgttgccttggtaggtccagcggcggaggaactctttgatccggttcctgaacaggatctatttgaggcgctaaatgaaaccttaacgctatggaactcgccgcccgactgggctggcgatgagcgaaatgtagtgcttacgttgtcccgcatttggtacagcgcagtaaccggcaaaatcgcgccgaaggatgtcgctgccgactgggcaatggagcgcctgccggcccagtatcagcccgtcatacttgaagctaggcaggcttatcttggacaagaagatcgcttggcctcgcgcgcagatcagttggaagaatttgttcactacgtgaaaggcgagatcaccaaggtagtcggcaaataatcactagaccaatgttacacatatatactttagattgatttaaaacttcatttttaatttaaaaggatctaggtgaagatcctttttgataatctcatgaccaaaatcccttaacgtgagttttcgttccactgagcgtcagaccccgtagaaaagatcaaaggatcttcttgagatcctttttttctgcgcgtaatctgctgcttgcaaacaaaaaaaccaccgctaccagcggtggtttgtttgccggatcaagagctaccaactcttcttccgaaggtaactggcttcagcagagcgcagataccaaatactgttcttctagtgtagccgtagttaggccaccacttcaagaactctgtagcaccgcctacatacctcgctctgctaatcctgttaccagtggctgctgccagtggcgataagtcgtgtcttaccgggttggactcaagacgatagttaccggataaggcgcagcggtcgggctgaacggggggttcgtgcacacagcccagcttggagcgaacgacctacaccgaactgagatacctacagcgtgagctatgagaaagcgccacgcttcccgaagggagaaaggcggacaggtatccggtaagcggcagggtcggaacaggagagcgcacgagggagcttccagggggaaacgcctggtatctttatagtcctgtcgggtttcgccacctctgacttgagcgtcgatttttgtgatgctcgtcaggggggcggagcctatggaaaaacgccagcaacgcggcctttttacggttcctggccttttgctggccttttgctcacatgagatctcaaacaaacacatacagcgacttagtttacccgccaatatatcctgtcaaggctcgaactaggctcggacgaagtaagcggccgcaaccttaattaaacacggcgcgccaacagcgatcgcaccaggtacc

SEQ ID NO: 270 - DNA, 6995 bp, synthetic construct
  misc_feature 1..6995: note = pAGS-0033 CMV promoter
  source 1..6995: mol_type = other DNA
acctcctactccaaaaatgtcaaagatacagtctcagaagaccaaagggctattgagacttttcaacaaagggtaatatcgggaaacctcctcggattccattgcccagctatctgtcacttcatcaaaaggacagtagaaaaggaaggtggcacctacaaatgccatcattgcgataaaggaaaggctatcgttcaagatgcccctgccgacagtggtcccaaagatggacccccacccacgaggagcatcgtggaaaaagaagacgttccaaccacgtcttcaaagcaagtggattgatgtgatatctccactgacgtaagggatgacgcacaatcccactatccttcgcaagacccttcctctatataaggaagttcatttcatttggagaggacagccaacagtattcagtcgactggtaccaacaggctatggtgagcaagggcgaggagctgttcaccggggtggtgcccatcctggtcgagctggacggcgacgtaaacggccacaagttcagcgtgtccggcgagggcgagggcgatgccacctacggcaagctgaccctgaagttcatctgcaccaccggcaagctgcccgtgccctggcccaccctcgtgaccaccctgacctacggcgtgcagtgcttcagccgctaccccgaccacatgaagcagcacgacttcttcaagtccgccatgcccgaaggctacgtccaggagcgcaccatcttcttcaaggacgacggcaactacaagacccgcgccgaggtgaagttcgagggcgacaccctggtgaaccgcatcgagctgaagggcatcgacttcaaggaggacggcaacatcctggggcacaagctggagtacaactacaacagccacaacgtctatatcatggccgacaagcagaagaacggcatcaaggtgaacttcaagatccgccacaacatcgaggacggcagcgtgcagctcgccgaccactaccagcagaacacccccatcggcgacggccccgtgctgctgcccgacaaccactacctgagcacccagtccgccctgagcaaagaccccaacgagaagcgcgatcacatggtcctgctggagttcgtgaccgccgccgggatcactctcggcatggacgagctgtacaagtcaggtggatcctagataacctttaccttcattccctgtaaattggtaccctgcaaagctttcgttcgtatcatcggtttcgacaacgttcgtcaagttcaatgcatcagtttcattgcgcacacaccagaatcctactgagtttgagtattatggcattgggaaaactgtttttcttgtaccatttgttgtgcttgtaatttactgtgttttttattcggttttcgctatcgaactgtgaaatggaaatggatggagaagagttaatgaatgatatggtccttttgttcattctcaaattaatattatttgttttttctcttatttgttgtgtgttgaatttgaaattataagagatatgcaaacattttgttttgagtaaaaatgtgtcaaatcgtggcctctaatgaccgaagttaatatgaggagtaaaacacttgtagttgtaccattatgcttattcactaggcaacaaatatattttcagacctagaaaagctgcaaatgttactgaatacaagtatgtcctcttgtgttttagacatttatgaactttcctttatgtaattttccagaatccttgtcagattctaatcattgctttataattatagttatactcatggatttgtagttgagtatgaaaatattttttaatgcattttatgacttgccaattgattgacaacatgcatcaatcgactagtcgacgagtcagtaataaacggcgtcaaagtggttgcagccggcacacacgagtcgtgtttatcaactcaaagcacaaatacttttcctcaacctaaaaataaggcaattagccaaaaacaactttgcgtgtaaacaacgctcaatacacgtgtcattttattattagctattgcttcaccgccttagctttctcgtgacctagtcgtcctcgtcttttcttcttcttcttctataaaacaatacccaaagagctcttcttcttcacaattcagatttcaatttctcaaaatcttaaaaactttctctcaattctctctaccgtgatcaaggtaaatttctgtgttccttattctctcaaaatcttcgattttgttttcgttcgatcccaatttcgtatatgttctttggtttagattctgttaatcttagatcgaagacgattttctgggtttgatcgttagatatcatcttaattctcgattagggtttcatagatatcatccgatttgttcaaataatttgagttttgtcgaataattactcttcgatttgtgatttctatctagatctggtgttagtttctagtttgtgcgatcgaatttgtagattaatctgagtttttctgattaacaccacaccaatctggtaccagaaaaggggagaagcaaaaccatgggtaaaaagcctgaactcaccgcgacgtctgtcgagaagtttctgatcgaaaagttcgacagcgtctccgacctgatgcagctctcggagggcgaagaatctcgtgctttcagcttcgatgtaggagggcgtggatatgtcctgcgggtaaatagctgcgccgatggtttctacaaagatcgttatgtttatcggcactttgcatcggccgcgctcccgattccggaagtgcttgacattggggcattcagcgagagcctgacctattgcatctcccgccgtgcacagggtgtcacgttgcaagacctgcctgaaaccgaactgcccgctgttctgcaaccggtcgcggaggcgatggatgccatcgctgcggccgatcttagccagacgagcgggttcggcccattcggaccgcaaggaatcggtcaatacactacatggcgtgatttcatatgcgcgattgctgatccccatgtgtatcactggcaaactgtgatggacgacaccgtcagtgcgtccgtcgcgcaggctctcgatgagctgatgctttgggccgaggactgccccgaagtccggcacctcgtgcacgcggatttcggctccaacaatgtcctgacggacaatggccgcataacagcggtcattgactggagcgaggcgatgttcggggattcccaatacgaggtcgccaacatcttcttctggaggccgtggttggcttgtatggagcagcagacgcgctacttcgagcggaggcatccggagcttgcaggatcgccgcggctccgggcgtatatgctccgcattggtcttgaccaactctatcagagcttggttgacggcaatttcgatgatgcagcttgggcgcagggtcgatgcgacgcaatcgtccgatccggagccgggactgtcgggcgtacacaaatcgcccgcagaagcgcggccgtctggaccgatggctgtgtagaagtactcgccgatagtggaaaccgacgccccagcactcgtccgagggcaaaggaatagatgcatcctgctttaatgagatatgcgagacgcctatgatcgcatgatatttgctttcaattctgttgtgcacgttgtaaaaaacctgagcatgtgtagctcagatccttaccgccggtttcggttcattctaatgaatatatcacccgttactatcgtatttttatgaataatattctccgttcaatttactgattgtaccctactacttatatgtacaatattaaaatgaaaacaatatattgtgctgaataggtttatagcgacatctatgatagagcgccacaataacaaacaattgcgttttattattacaaatccaattttaaaaaaagcggcagaaccggtcaaacctaaaagactgattacataaatcttattcaaatttcaaaagtgccccaggggctagtatctacgacacaccgagcggcgaactaataacgctcactgaagggaactccggttccccgccggcgcgcatgggtgagattccttgaagttgagtattggccgtccgctctaccgaaagttacgggcaccattcaacccggtccagcacggcggccgggtaaccgacttgctgccccgagaattatgcagcatttttttggtgtatgtgggccccaaatgaagtgcaggtcaaaccttgacagtgacgacaaatcgttgggcgggtccagggcgaattttgcgacaacatgtcgaggctcagcaggaccggcatgcaagctagcttactagtgatattctatagtgtcacctaaatgtattctagaccaagcatgcacagctggcgttctcagccagatccaacgttacaccacaatatatcctgccaagatctaattccggggatcggaaatccagaagcccgagaggttgccgcctttcgggctttttctttttcaaaaaaaaaaatttataaaacgatctgttgcggccggccgccgggttgtgggcaaaggcgctcgacggtgggcaaccgcttgcggttgtccacgggcggagccggtgcgcgtagcgcattgtccacaagccaagggcgaccaataattgatatatatattcataattgaaaagctaattgaacatactacttgctgtaactacttgccggagcgaggggtgtttgcaagctgttgatctgaaagggctattagcgttctcacgtgcctttttgattagcgatttcacgtgaccttattagcgatttcacgtactccgattagcgatttcacgtaccctgattagcgatttcacgtggatagtttttggagcgggccggaaagccccgtgaatcaaggctttgcggggcattagcggtttcacgtggataactaccctctatccacaggcttccggggataaaaaagcccgctcgacggcgggctgttggatggggatcgcctgaatcgccccatcatccagccagaaagtgagggagccacggttgatgagagctttgttgtaggtggaccagttggtgattttgaacttttgctttgccacggaacggtctgcgttgtcgggaagatgcgtgatctgatccttcaactcagcaaaagttcgatttattcaacaaagccacgttgtgtctcaaaatctctgatgttacattgcacaagataaaaatatatcatcatgaacaataaaactgtctgcttacataaacagtaatacaaggggtgttatgagggaagcggtgatcgccgaagtatcgactcaactatcagaggtagttggcgtcatcgagcgccatctcgaaccgacgttgctggccgtacatttgtacggctccgcagtggatggcggcctgaagccacacagtgatattgatttgctggttacggtgaccgtaaggcttgatgaaacaacgcggcgagctttgatcaacgaccttttggaaacttcggcttcccctggagagagcgagattctccgcgctgtagaagtcaccattgttgtgcacgacgacatcattccgtggcgttatccagctaagcgcgaactgcaatttggagaatggcagcgcaatgacattcttgcaggtatcttcgagccagccacgatcgacattgatctggctatcttgctgacaaaagcaagagaacatagcgttgccttggtaggtccagcggcggaggaactctttgatccggttcctgaacaggatctatttgaggcgctaaatgaaaccttaacgctatggaactcgccgcccgactgggctggcgatgagcgaaatgtagtgcttacgttgtcccgcatttggtacagcgcagtaaccggcaaaatcgcgccgaaggatgtcgctgccgactgggcaatggagcgcctgccggcccagtatcagcccgtcatacttgaagctaggcaggcttatcttggacaagaagatcgcttggcctcgcgcgcagatcagttggaagaatttgttcactacgtgaaaggcgagatcaccaaggtagtcggcaaataatcactagaccaatgttacacatatatactttagattgatttaaaacttcatttttaatttaaaaggatctaggtgaagatcctttttgataatctcatgaccaaaatcccttaacgtgagttttcgttccactgagcgtcagaccccgtagaaaagatcaaaggatcttcttgagatcctttttttctgcgcgtaatctgctgcttgcaaacaaaaaaaccaccgctaccagcggtggtttgtttgccggatcaagagctaccaactcttcttccgaaggtaactggcttcagcagagcgcagataccaaatactgttcttctagtgtagccgtagttaggccaccacttcaagaactctgtagcaccgcctacatacctcgctctgctaatcctgttaccagtggctgctgccagtggcgataagtcgtgtcttaccgggttggactcaagacgatagttaccggataaggcgcagcggtcgggctgaacggggggttcgtgcacacagcccagcttggagcgaacgacctacaccgaactgagatacctacagcgtgagctatgagaaagcgccacgcttcccgaagggagaaaggcggacaggtatccggtaagcggcagggtcggaacaggagagcgcacgagggagcttccagggggaaacgcctggtatctttatagtcctgtcgggtttcgccacctctgacttgagcgtcgatttttgtgatgctcgtcaggggggcggagcctatggaaaaacgccagcaacgcggcctttttacggttcctggccttttgctggccttttgctcacatgagatctcaaacaaacacatacagcgacttagtttacccgccaatatatcctgtcaaggctcgaactaggctcggacgaagtaagcggccgcaaccttaattaaacacggcgcgccaacagcgatcgcaccaggtacc

SEQ ID NO: 271 - DNA, 7021 bp, synthetic construct
  misc_feature 1..7021: note = pAGS-0034 CMV promoter+enhancer
  source 1..7021: mol_type = other DNA
acctgtgtaatgtattggtaatttgggaagatataataggaagcaaggctatttatccatttctgaaaaggcgaaatggcgtcaccgcgagcgtcacgcgcattccgttcttgctgtaaagcgttgtttggtacacttttgactagcgaggcttggcgtgtcagcgtatctattcaaaagtcgttaatggctgcggatcaagaaaaagttggaatagaaacagaatacccgcgaaattcaggcccggttgccatgtcctacacgccgaaataaacgaccaaattagtagaaaaataaaaactgactcggatacttacgtcacgtcttgcgcactgatttgaaaaatctcaatataaacaaagacggccacaagaaaaaaccaaaacaccgatattcattaatcttatctagtttctcaaaaaaatcataacagtattcagtcgactggtaccaacaggctatggtgagcaagggcgaggagctgttcaccggggtggtgcccatcctggtcgagctggacggcgacgtaaacggccacaagttcagcgtgtccggcgagggcgagggcgatgccacctacggcaagctgaccctgaagttcatctgcaccaccggcaagctgcccgtgccctggcccaccctcgtgaccaccctgacctacggcgtgcagtgcttcagccgctaccccgaccacatgaagcagcacgacttcttcaagtccgccatgcccgaaggctacgtccaggagcgcaccatcttcttcaaggacgacggcaactacaagacccgcgccgaggtgaagttcgagggcgacaccctggtgaaccgcatcgagctgaagggcatcgacttcaaggaggacggcaacatcctggggcacaagctggagtacaactacaacagccacaacgtctatatcatggccgacaagcagaagaacggcatcaaggtgaacttcaagatccgccacaacatcgaggacggcagcgtgcagctcgccgaccactaccagcagaacacccccatcggcgacggccccgtgctgctgcccgacaaccactacctgagcacccagtccgccctgagcaaagaccccaacgagaagcgcgatcacatggtcctgctggagttcgtgaccgccgccgggatcactctcggcatggacgagctgtacaagtcaggtggatcctagataacctttaccttcattccctgtaaattggtaccctgcaaagctttcgttcgtatcatcggtttcgacaacgttcgtcaagttcaatgcatcagtttcattgcgcacacaccagaatcctactgagtttgagtattatggcattgggaaaactgtttttcttgtaccatttgttgtgcttgtaatttactgtgttttttattcggttttcgctatcgaactgtgaaatggaaatggatggagaagagttaatgaatgatatggtccttttgttcattctcaaattaatattatttgttttttctcttatttgttgtgtgttgaatttgaaattataagagatatgcaaacattttgttttgagtaaaaatgtgtcaaatcgtggcctctaatgaccgaagttaatatgaggagtaaaacacttgtagttgtaccattatgcttattcactaggcaacaaatatattttcagacctagaaaagctgcaaatgttactgaatacaagtatgtcctcttgtgttttagacatttatgaactttcctttatgtaattttccagaatccttgtcagattctaatcattgctttataattatagttatactcatggatttgtagttgagtatgaaaatattttttaatgcattttatgacttgccaattgattgacaacatgcatcaatcgactagtcgacgagtcagtaataaacggcgtcaaagtggttgcagccggcacacacgagtcgtgtttatcaactcaaagcacaaatacttttcctcaacctaaaaataaggcaattagccaaaaacaactttgcgtgtaaacaacgctcaatacacgtgtcattttattattagctattgcttcaccgccttagctttctcgtgacctagtcgtcctcgtcttttcttcttcttcttctataaaacaatacccaaagagctcttcttcttcacaattcagatttcaatttctcaaaatcttaaaaactttctctcaattctctctaccgtgatcaaggtaaatttctgtgttccttattctctcaaaatcttcgattttgttttcgttcgatcccaatttcgtatatgttctttggtttagattctgttaatcttagatcgaagacgattttctgggtttgatcgttagatatcatcttaattctcgattagggtttcatagatatcatccgatttgttcaaataatttgagttttgtcgaataattactcttcgatttgtgatttctatctagatctggtgttagtttctagtttgtgcgatcgaatttgtagattaatctgagtttttctgattaacaccacaccaatctggtaccagaaaaggggagaagcaaaaccatgggtaaaaagcctgaactcaccgcgacgtctgtcgagaagtttctgatcgaaaagttcgacagcgtctccgacctgatgcagctctcggagggcgaagaatctcgtgctttcagcttcgatgtaggagggcgtggatatgtcctgcgggtaaatagctgcgccgatggtttctacaaagatcgttatgtttatcggcactttgcatcggccgcgctcccgattccggaagtgcttgacattggggcattcagcgagagcctgacctattgcatctcccgccgtgcacagggtgtcacgttgcaagacctgcctgaaaccgaactgcccgctgttctgcaaccggtcgcggaggcgatggatgccatcgctgcggccgatcttagccagacgagcgggttcggcccattcggaccgcaaggaatcggtcaatacactacatggcgtgatttcatatgcgcgattgctgatccccatgtgtatcactggcaaactgtgatggacgacaccgtcagtgcgtccgtcgcgcaggctctcgatgagctgatgctttgggccgaggactgccccgaagtccggcacctcgtgcacgcggatttcggctccaacaatgtcctgacggacaatggccgcataacagcggtcattgactggagcgaggcgatgttcggggattcccaatacgaggtcgccaacatcttcttctggaggccgtggttggcttgtatggagcagcagacgcgctacttcgagcggaggcatccggagcttgcaggatcgccgcggctccgggcgtatatgctccgcattggtcttgaccaactctatcagagcttggttgacggcaatttcgatgatgcagcttgggcgcagggtcgatgcgacgcaatcgtccgatccggagccgggactgtcgggcgtacacaaatcgcccgcagaagcgcggccgtctggaccgatggctgtgtagaagtactcgccgatagtggaaaccgacgccccagcactcgtccgagggcaaaggaatagatgcatcctgctttaatgagatatgcgagacgcctatgatcgcatgatatttgctttcaattctgttgtgcacgttgtaaaaaacctgagcatgtgtagctcagatccttaccgccggtttcggttcattctaatgaatatatcacccgttactatcgtatttttatgaataatattctccgttcaatttactgattgtaccctactacttatatgtacaatattaaaatgaaaacaatatattgtgctgaataggtttatagcgacatctatgatagagcgccacaataacaaacaattgcgttttattattacaaatccaattttaaaaaaagcggcagaaccggtcaaacctaaaagactgattacataaatcttattcaaatttcaaaagtgccccaggggctagtatctacgacacaccgagcggcgaactaataacgctcactgaagggaactccggttccccgccggcgcgcatgggtgagattccttgaagttgagtattggccgtccgctctaccgaaagttacgggcaccattcaacccggtccagcacggcggccgggtaaccgacttgctgccccgagaattatgcagcatttttttggtgtatgtgggccccaaatgaagtgcaggtcaaaccttgacagtgacgacaaatcgttgggcgggtccagggcgaattttgcgacaacatgtcgaggctcagcaggaccggcatgcaagctagcttactagtgatattctatagtgtcacctaaatgtattctagaccaagcatgcacagctggcgttctcagccagatccaacgttacaccacaatatatcctgccaagatctaattccggggatcggaaatccagaagcccgagaggttgccgcctttcgggctttttctttttcaaaaaaaaaaatttataaaacgatctgttgcggccggccgccgggttgtgggcaaaggcgctcgacggtgggcaaccgcttgcggttgtccacgggcggagccggtgcgcgtagcgcattgtccacaagccaagggcgaccaataattgatatatatattcataattgaaaagctaattgaacatactacttgctgtaactacttgccggagcgaggggtgtttgcaagctgttgatctgaaagggctattagcgttctcacgtgcctttttgattagcgatttcacgtgaccttattagcgatttcacgtactccgattagcgatttcacgtaccctgattagcgatttcacgtggatagtttttggagcgggccggaaagccccgtgaatcaaggctttgcggggcattagcggtttcacgtggataactaccctctatccacaggcttccggggataaaaaagcccgctcgacggcgggctgttggatggggatcgcctgaatcgccccatcatccagccagaaagtgagggagccacggttgatgagagctttgttgtaggtggaccagttggtgattttgaacttttgctttgccacggaacggtctgcgttgtcgggaagatgcgtgatctgatccttcaactcagcaaaagttcgatttattcaacaaagccacgttgtgtctcaaaatctctgatgttacattgcacaagataaaaatatatcatcatgaacaataaaactgtctgcttacataaacagtaatacaaggggtgttatgagggaagcggtgatcgccgaagtatcgactcaactatcagaggtagttggcgtcatcgagcgccatctcgaaccgacgttgctggccgtacatttgtacggctccgcagtggatggcggcctgaagccacacagtgatattgatttgctggttacggtgaccgtaaggcttgatgaaacaacgcggcgagctttgatcaacgaccttttggaaacttcggcttcccctggagagagcgagattctccgcgctgtagaagtcaccattgttgtgcacgacgacatcattccgtggcgttatccagctaagcgcgaactgcaatttggagaatggcagcgcaatgacattcttgcaggtatcttcgagccagccacgatcgacattgatctggctatcttgctgacaaaagcaagagaacatagcgttgccttggtaggtccagcggcggaggaactctttgatccggttcctgaacaggatctatttgaggcgctaaatgaaaccttaacgctatggaactcgccgcccgactgggctggcgatgagcgaaatgtagtgcttacgttgtcccgcatttggtacagcgcagtaaccggcaaaatcgcgccgaaggatgtcgctgccgactgggcaatggagcgcctgccggcccagtatcagcccgtcatacttgaagctaggcaggcttatcttggacaagaagatcgcttggcctcgcgcgcagatcagttggaagaatttgttcactacgtgaaaggcgagatcaccaaggtagtcggcaaataatcactagaccaatgttacacatatatactttagattgatttaaaacttcatttttaatttaaaaggatctaggtgaagatcctttttgataatctcatgaccaaaatcccttaacgtgagttttcgttccactgagcgtcagaccccgtagaaaagatcaaaggatcttcttgagatcctttttttctgcgcgtaatctgctgcttgcaaacaaaaaaaccaccgctaccagcggtggtttgtttgccggatcaagagctaccaactcttcttccgaaggtaactggcttcagcagagcgcagataccaaatactgttcttctagtgtagccgtagttaggccaccacttcaagaactctgtagcaccgcctacatacctcgctctgctaatcctgttaccagtggctgctgccagtggcgataagtcgtgtcttaccgggttggactcaagacgatagttaccggataaggcgcagcggtcgggctgaacggggggttcgtgcacacagcccagcttggagcgaacgacctacaccgaactgagatacctacagcgtgagctatgagaaagcgccacgcttcccgaagggagaaaggcggacaggtatccggtaagcggcagggtcggaacaggagagcgcacgagggagcttccagggggaaacgcctggtatctttatagtcctgtcgggtttcgccacctctgacttgagcgtcgatttttgtgatgctcgtcaggggggcggagcctatggaaaaacgccagcaacgcggcctttttacggttcctggccttttgctggccttttgctcacatgagatctcaaacaaacacatacagcgacttagtttacccgccaatatatcctgtcaaggctcgaactaggctcggacgaagtaagcggccgcaaccttaattaaacacggcgcgccaacagcgatcgcaccaggtacc

SEQ ID NO: 272 - DNA, 7090 bp, synthetic construct
  misc_feature 1..7090: note = pAGS-0035 SV40 promoter
  source 1..7090: mol_type = other DNA
acctgctgaggcttgacatgattggtgcgtatgtttgtatgaagctacaggactgatttggcgggctatgagggcgggggaagctctggaagggccgcgatggggcgcgcggcgtccagaaggcgccatacggcccgctggcggcacccatccggtataaaagcccgcgaccccgaacggtgacctccactttcagcgacaaacgagcacttatacatacgcgactattctgccgctatacataaccactcagctagcttaagatcccatcaagcttgcatgccgggcgcgccagaaggagcgcagccaaaccaggatgatgtttgatggggtatttgagcacttgcaacccttatccggaagccccctggcccacaaaggctaggcgccaatgcaagcagttcgcatgcagcccctggagcggtgccctcctgataaaccggccagggggcctatgttctttacttttttacaagagaagtcactcaacatcttaaaacagtattcagtcgactggtaccaacaggctatggtgagcaagggcgaggagctgttcaccggggtggtgcccatcctggtcgagctggacggcgacgtaaacggccacaagttcagcgtgtccggcgagggcgagggcgatgccacctacggcaagctgaccctgaagttcatctgcaccaccggcaagctgcccgtgccctggcccaccctcgtgaccaccctgacctacggcgtgcagtgcttcagccgctaccccgaccacatgaagcagcacgacttcttcaagtccgccatgcccgaaggctacgtccaggagcgcaccatcttcttcaaggacgacggcaactacaagacccgcgccgaggtgaagttcgagggcgacaccctggtgaaccgcatcgagctgaagggcatcgacttcaaggaggacggcaacatcctggggcacaagctggagtacaactacaacagccacaacgtctatatcatggccgacaagcagaagaacggcatcaaggtgaacttcaagatccgccacaacatcgaggacggcagcgtgcagctcgccgaccactaccagcagaacacccccatcggcgacggccccgtgctgctgcccgacaaccactacctgagcacccagtccgccctgagcaaagaccccaacgagaagcgcgatcacatggtcctgctggagttcgtgaccgccgccgggatcactctcggcatggacgagctgtacaagtcaggtggatcctagataacctttaccttcattccctgtaaattggtaccctgcaaagctttcgttcgtatcatcggtttcgacaacgttcgtcaagttcaatgcatcagtttcattgcgcacacaccagaatcctactgagtttgagtattatggcattgggaaaactgtttttcttgtaccatttgttgtgcttgtaatttactgtgttttttattcggttttcgctatcgaactgtgaaatggaaatggatggagaagagttaatgaatgatatggtccttttgttcattctcaaattaatattatttgttttttctcttatttgttgtgtgttgaatttgaaattataagagatatgcaaacattttgttttgagtaaaaatgtgtcaaatcgtggcctctaatgaccgaagttaatatgaggagtaaaacacttgtagttgtaccattatgcttattcactaggcaacaaatatattttcagacctagaaaagctgcaaatgttactgaatacaagtatgtcctcttgtgttttagacatttatgaactttcctttatgtaattttccagaatccttgtcagattctaatcattgctttataattatagttatactcatggatttgtagttgagtatgaaaatattttttaatgcattttatgacttgccaattgattgacaacatgcatcaatcgactagtcgacgagtcagtaataaacggcgtcaaagtggttgcagccggcacacacgagtcgtgtttatcaactcaaagcacaaatacttttcctcaacctaaaaataaggcaattagccaaaaacaactttgcgtgtaaacaacgctcaatacacgtgtcattttattattagctattgcttcaccgccttagctttctcgtgacctagtcgtcctcgtcttttcttcttcttcttctataaaacaatacccaaagagctcttcttcttcacaattcagatttcaatttctcaaaatcttaaaaactttctctcaattctctctaccgtgatcaaggtaaatttctgtgttccttattctctcaaaatcttcgattttgttttcgttcgatcccaatttcgtatatgttctttggtttagattctgttaatcttagatcgaagacgattttctgggtttgatcgttagatatcatcttaattctcgattagggtttcatagatatcatccgatttgttcaaataatttgagttttgtcgaataattactcttcgatttgtgatttctatctagatctggtgttagtttctagtttgtgcgatcgaatttgtagattaatctgagtttttctgattaacaccacaccaatctggtaccagaaaaggggagaagcaaaaccatgggtaaaaagcctgaactcaccgcgacgtctgtcgagaagtttctgatcgaaaagttcgacagcgtctccgacctgatgcagctctcggagggcgaagaatctcgtgctttcagcttcgatgtaggagggcgtggatatgtcctgcgggtaaatagctgcgccgatggtttctacaaagatcgttatgtttatcggcactttgcatcggccgcgctcccgattccggaagtgcttgacattggggcattcagcgagagcctgacctattgcatctcccgccgtgcacagggtgtcacgttgcaagacctgcctgaaaccgaactgcccgctgttctgcaaccggtcgcggaggcgatggatgccatcgctgcggccgatcttagccagacgagcgggttcggcccattcggaccgcaaggaatcggtcaatacactacatggcgtgatttcatatgcgcgattgctgatccccatgtgtatcactggcaaactgtgatggacgacaccgtcagtgcgtccgtcgcgcaggctctcgatgagctgatgctttgggccgaggactgccccgaagtccggcacctcgtgcacgcggatttcggctccaacaatgtcctgacggacaatggccgcataacagcggtcattgactggagcgaggcgatgttcggggattcccaatacgaggtcgccaacatcttcttctggaggccgtggttggcttgtatggagcagcagacgcgctacttcgagcggaggcatccggagcttgcaggatcgccgcggctccgggcgtatatgctccgcattggtcttgaccaactctatcagagcttggttgacggcaatttcgatgatgcagcttgggcgcagggtcgatgcgacgcaatcgtccgatccggagccgggactgtcgggcgtacacaaatcgcccgcagaagcgcggccgtctggaccgatggctgtgtagaagtactcgccgatagtggaaaccgacgccccagcactcgtccgagggcaaaggaatagatgcatcctgctttaatgagatatgcgagacgcctatgatcgcatgatatttgctttcaattctgttgtgcacgttgtaaaaaacctgagcatgtgtagctcagatccttaccgccggtttcggttcattctaatgaatatatcacccgttactatcgtatttttatgaataatattctccgttcaatttactgattgtaccctactacttatatgtacaatattaaaatgaaaacaatatattgtgctgaataggtttatagcgacatctatgatagagcgccacaataacaaacaattgcgttttattattacaaatccaattttaaaaaaagcggcagaaccggtcaaacctaaaagactgattacataaatcttattcaaatttcaaaagtgccccaggggctagtatctacgacacaccgagcggcgaactaataacgctcactgaagggaactccggttccccgccggcgcgcatgggtgagattccttgaagttgagtattggccgtccgctctaccgaaagttacgggcaccattcaacccggtccagcacggcggccgggtaaccgacttgctgccccgagaattatgcagcatttttttggtgtatgtgggccccaaatgaagtgcaggtcaaaccttgacagtgacgacaaatcgttgggcgggtccagggcgaattttgcgacaacatgtcgaggctcagcaggaccggcatgcaagctagcttactagtgatattctatagtgtcacctaaatgtattctagaccaagcatgcacagctggcgttctcagccagatccaacgttacaccacaatatatcctgccaagatctaattccggggatcggaaatccagaagcccgagaggttgccgcctttcgggctttttctttttcaaaaaaaaaaatttataaaacgatctgttgcggccggccgccgggttgtgggcaaaggcgctcgacggtgggcaaccgcttgcggttgtccacgggcggagccggtgcgcgtagcgcattgtccacaagccaagggcgaccaataattgatatatatattcataattgaaaagctaattgaacatactacttgctgtaactacttgccggagcgaggggtgtttgcaagctgttgatctgaaagggctattagcgttctcacgtgcctttttgattagcgatttcacgtgaccttattagcgatttcacgtactccgattagcgatttcacgtaccctgattagcgatttcacgtggatagtttttggagcgggccggaaagccccgtgaatcaaggctttgcggggcattagcggtttcacgtggataactaccctctatccacaggcttccggggataaaaaagcccgctcgacggcgggctgttggatggggatcgcctgaatcgccccatcatccagccagaaagtgagggagccacggttgatgagagctttgttgtaggtggaccagttggtgattttgaacttttgctttgccacggaacggtctgcgttgtcgggaagatgcgtgatctgatccttcaactcagcaaaagttcgatttattcaacaaagccacgttgtgtctcaaaatctctgatgttacattgcacaagataaaaatatatcatcatgaacaataaaactgtctgcttacataaacagtaatacaaggggtgttatgagggaagcggtgatcgccgaagtatcgactcaactatcagaggtagttggcgtcatcgagcgccatctcgaaccgacgttgctggccgtacatttgtacggctccgcagtggatggcggcctgaagccacacagtgatattgatttgctggttacggtgaccgtaaggcttgatgaaacaacgcggcgagctttgatcaacgaccttttggaaacttcggcttcccctggagagagcgagattctccgcgctgtagaagtcaccattgttgtgcacgacgacatcattccgtggcgttatccagctaagcgcgaactgcaatttggagaatggcagcgcaatgacattcttgcaggtatcttcgagccagccacgatcgacattgatctggctatcttgctgacaaaagcaagagaacatagcgttgccttggtaggtccagcggcggaggaactctttgatccggttcctgaacaggatctatttgaggcgctaaatgaaaccttaacgctatggaactcgccgcccgactgggctggcgatgagcgaaatgtagtgcttacgttgtcccgcatttggtacagcgcagtaaccggcaaaatcgcgccgaaggatgtcgctgccgactgggcaatggagcgcctgccggcccagtatcagcccgtcatacttgaagctaggcaggcttatcttggacaagaagatcgcttggcctcgcgcgcagatcagttggaagaatttgttcactacgtgaaaggcgagatcaccaaggtagtcggcaaataatcactagaccaatgttacacatatatactttagattgatttaaaacttcatttttaatttaaaaggatctaggtgaagatcctttttgataatctcatgaccaaaatcccttaacgtgagttttcgttccactgagcgtcagaccccgtagaaaagatcaaaggatcttcttgagatcctttttttctgcgcgtaatctgctgcttgcaaacaaaaaaaccaccgctaccagcggtggtttgtttgccggatcaagagctaccaactcttcttccgaaggtaactggcttcagcagagcgcagataccaaatactgttcttctagtgtagccgtagttaggccaccacttcaagaactctgtagcaccgcctacatacctcgctctgctaatcctgttaccagtggctgctgccagtggcgataagtcgtgtcttaccgggttggactcaagacgatagttaccggataaggcgcagcggtcgggctgaacggggggttcgtgcacacagcccagcttggagcgaacgacctacaccgaactgagatacctacagcgtgagctatgagaaagcgccacgcttcccgaagggagaaaggcggacaggtatccggtaagcggcagggtcggaacaggagagcgcacgagggagcttccagggggaaacgcctggtatctttatagtcctgtcgggtttcgccacctctgacttgagcgtcgatttttgtgatgctcgtcaggggggcggagcctatggaaaaacgccagcaacgcggcctttttacggttcctggccttttgctggccttttgctcacatgagatctcaaacaaacacatacagcgacttagtttacccgccaatatatcctgtcaaggctcgaactaggctcggacgaagtaagcggccgcaaccttaattaaacacggcgcgccaacagcgatcgcaccaggtacc

SEQ ID NO: 273 - DNA, 7418 bp, synthetic construct
  misc_feature 1..7418: note = pAGS-0036 SV40 promoter+ enchancer
  source 1..7418: mol_type = other DNA
acctgatcccacacacctgcccgtctgcctgacaggaagtgaacgcatgtcgagggaggcctcaccaatcgtcacacgagccctcgtcagaaacacgtctccgccacgctctccctctcactgccgaccccgcagcccttttgccctttcctaggccaccgacaggacccaggcgctctcagcatgcctcaacaacccgtactcgtgccagcggtgcccttgtgctggtgatcgcttggaagcgcatgcgaagacgaaggggcggagcaggcggcctggctgttcgaagggctcgccgccagttcgggtgcctttctccacgcgcgcctccacacctaccgatgcgtgaaggcaggcaaatgctcatgtttgcccgaactcggagtccttaaaaagccgcttcttgtcgtcgttccgagacatgttagcagatcgcagtgccacctttcctgacgcgctcggccccatattcggacgcaattgtcatttgtagcacaattggagcaaatctggcgaggcagtaggcttttaagttgcaaggcgagagagcaaagtgggacgcggcgtgattattggtatttacgcgacggcccggcgcgttagcggcccttcccccaggccagggacgattatgtatcaatattgttgcgttcgggcactcgtgcgagggctcctgcgggctggggagggggatctgggaattggaggtacgaccgagatggcttgctcggggggaggtttcctcgccgagcaagccagggttaggtgttgcgctcttgactcgttgtgcattctaggaccccactgctactcacaacaagccaaaacagtattcagtcgactggtaccaacaggctatggtgagcaagggcgaggagctgttcaccggggtggtgcccatcctggtcgagctggacggcgacgtaaacggccacaagttcagcgtgtccggcgagggcgagggcgatgccacctacggcaagctgaccctgaagttcatctgcaccaccggcaagctgcccgtgccctggcccaccctcgtgaccaccctgacctacggcgtgcagtgcttcagccgctaccccgaccacatgaagcagcacgacttcttcaagtccgccatgcccgaaggctacgtccaggagcgcaccatcttcttcaaggacgacggcaactacaagacccgcgccgaggtgaagttcgagggcgacaccctggtgaaccgcatcgagctgaagggcatcgacttcaaggaggacggcaacatcctggggcacaagctggagtacaactacaacagccacaacgtctatatcatggccgacaagcagaagaacggcatcaaggtgaacttcaagatccgccacaacatcgaggacggcagcgtgcagctcgccgaccactaccagcagaacacccccatcggcgacggccccgtgctgctgcccgacaaccactacctgagcacccagtccgccctgagcaaagaccccaacgagaagcgcgatcacatggtcctgctggagttcgtgaccgccgccgggatcactctcggcatggacgagctgtacaagtcaggtggatcctagataacctttaccttcattccctgtaaattggtaccctgcaaagctttcgttcgtatcatcggtttcgacaacgttcgtcaagttcaatgcatcagtttcattgcgcacacaccagaatcctactgagtttgagtattatggcattgggaaaactgtttttcttgtaccatttgttgtgcttgtaatttactgtgttttttattcggttttcgctatcgaactgtgaaatggaaatggatggagaagagttaatgaatgatatggtccttttgttcattctcaaattaatattatttgttttttctcttatttgttgtgtgttgaatttgaaattataagagatatgcaaacattttgttttgagtaaaaatgtgtcaaatcgtggcctctaatgaccgaagttaatatgaggagtaaaacacttgtagttgtaccattatgcttattcactaggcaacaaatatattttcagacctagaaaagctgcaaatgttactgaatacaagtatgtcctcttgtgttttagacatttatgaactttcctttatgtaattttccagaatccttgtcagattctaatcattgctttataattatagttatactcatggatttgtagttgagtatgaaaatattttttaatgcattttatgacttgccaattgattgacaacatgcatcaatcgactagtcgacgagtcagtaataaacggcgtcaaagtggttgcagccggcacacacgagtcgtgtttatcaactcaaagcacaaatacttttcctcaacctaaaaataaggcaattagccaaaaacaactttgcgtgtaaacaacgctcaatacacgtgtcattttattattagctattgcttcaccgccttagctttctcgtgacctagtcgtcctcgtcttttcttcttcttcttctataaaacaatacccaaagagctcttcttcttcacaattcagatttcaatttctcaaaatcttaaaaactttctctcaattctctctaccgtgatcaaggtaaatttctgtgttccttattctctcaaaatcttcgattttgttttcgttcgatcccaatttcgtatatgttctttggtttagattctgttaatcttagatcgaagacgattttctgggtttgatcgttagatatcatcttaattctcgattagggtttcatagatatcatccgatttgttcaaataatttgagttttgtcgaataattactcttcgatttgtgatttctatctagatctggtgttagtttctagtttgtgcgatcgaatttgtagattaatctgagtttttctgattaacaccacaccaatctggtaccagaaaaggggagaagcaaaaccatgggtaaaaagcctgaactcaccgcgacgtctgtcgagaagtttctgatcgaaaagttcgacagcgtctccgacctgatgcagctctcggagggcgaagaatctcgtgctttcagcttcgatgtaggagggcgtggatatgtcctgcgggtaaatagctgcgccgatggtttctacaaagatcgttatgtttatcggcactttgcatcggccgcgctcccgattccggaagtgcttgacattggggcattcagcgagagcctgacctattgcatctcccgccgtgcacagggtgtcacgttgcaagacctgcctgaaaccgaactgcccgctgttctgcaaccggtcgcggaggcgatggatgccatcgctgcggccgatcttagccagacgagcgggttcggcccattcggaccgcaaggaatcggtcaatacactacatggcgtgatttcatatgcgcgattgctgatccccatgtgtatcactggcaaactgtgatggacgacaccgtcagtgcgtccgtcgcgcaggctctcgatgagctgatgctttgggccgaggactgccccgaagtccggcacctcgtgcacgcggatttcggctccaacaatgtcctgacggacaatggccgcataacagcggtcattgactggagcgaggcgatgttcggggattcccaatacgaggtcgccaacatcttcttctggaggccgtggttggcttgtatggagcagcagacgcgctacttcgagcggaggcatccggagcttgcaggatcgccgcggctccgggcgtatatgctccgcattggtcttgaccaactctatcagagcttggttgacggcaatttcgatgatgcagcttgggcgcagggtcgatgcgacgcaatcgtccgatccggagccgggactgtcgggcgtacacaaatcgcccgcagaagcgcggccgtctggaccgatggctgtgtagaagtactcgccgatagtggaaaccgacgccccagcactcgtccgagggcaaaggaatagatgcatcctgctttaatgagatatgcgagacgcctatgatcgcatgatatttgctttcaattctgttgtgcacgttgtaaaaaacctgagcatgtgtagctcagatccttaccgccggtttcggttcattctaatgaatatatcacccgttactatcgtatttttatgaataatattctccgttcaatttactgattgtaccctactacttatatgtacaatattaaaatgaaaacaatatattgtgctgaataggtttatagcgacatctatgatagagcgccacaataacaaacaattgcgttttattattacaaatccaattttaaaaaaagcggcagaaccggtcaaacctaaaagactgattacataaatcttattcaaatttcaaaagtgccccaggggctagtatctacgacacaccgagcggcgaactaataacgctcactgaagggaactccggttccccgccggcgcgcatgggtgagattccttgaagttgagtattggccgtccgctctaccgaaagttacgggcaccattcaacccggtccagcacggcggccgggtaaccgacttgctgccccgagaattatgcagcatttttttggtgtatgtgggccccaaatgaagtgcaggtcaaaccttgacagtgacgacaaatcgttgggcgggtccagggcgaattttgcgacaacatgtcgaggctcagcaggaccggcatgcaagctagcttactagtgatattctatagtgtcacctaaatgtattctagaccaagcatgcacagctggcgttctcagccagatccaacgttacaccacaatatatcctgccaagatctaattccggggatcggaaatccagaagcccgagaggttgccgcctttcgggctttttctttttcaaaaaaaaaaatttataaaacgatctgttgcggccggccgccgggttgtgggcaaaggcgctcgacggtgggcaaccgcttgcggttgtccacgggcggagccggtgcgcgtagcgcattgtccacaagccaagggcgaccaataattgatatatatattcataattgaaaagctaattgaacatactacttgctgtaactacttgccggagcgaggggtgtttgcaagctgttgatctgaaagggctattagcgttctcacgtgcctttttgattagcgatttcacgtgaccttattagcgatttcacgtactccgattagcgatttcacgtaccctgattagcgatttcacgtggatagtttttggagcgggccggaaagccccgtgaatcaaggctttgcggggcattagcggtttcacgtggataactaccctctatccacaggcttccggggataaaaaagcccgctcgacggcgggctgttggatggggatcgcctgaatcgccccatcatccagccagaaagtgagggagccacggttgatgagagctttgttgtaggtggaccagttggtgattttgaacttttgctttgccacggaacggtctgcgttgtcgggaagatgcgtgatctgatccttcaactcagcaaaagttcgatttattcaacaaagccacgttgtgtctcaaaatctctgatgttacattgcacaagataaaaatatatcatcatgaacaataaaactgtctgcttacataaacagtaatacaaggggtgttatgagggaagcggtgatcgccgaagtatcgactcaactatcagaggtagttggcgtcatcgagcgccatctcgaaccgacgttgctggccgtacatttgtacggctccgcagtggatggcggcctgaagccacacagtgatattgatttgctggttacggtgaccgtaaggcttgatgaaacaacgcggcgagctttgatcaacgaccttttggaaacttcggcttcccctggagagagcgagattctccgcgctgtagaagtcaccattgttgtgcacgacgacatcattccgtggcgttatccagctaagcgcgaactgcaatttggagaatggcagcgcaatgacattcttgcaggtatcttcgagccagccacgatcgacattgatctggctatcttgctgacaaaagcaagagaacatagcgttgccttggtaggtccagcggcggaggaactctttgatccggttcctgaacaggatctatttgaggcgctaaatgaaaccttaacgctatggaactcgccgcccgactgggctggcgatgagcgaaatgtagtgcttacgttgtcccgcatttggtacagcgcagtaaccggcaaaatcgcgccgaaggatgtcgctgccgactgggcaatggagcgcctgccggcccagtatcagcccgtcatacttgaagctaggcaggcttatcttggacaagaagatcgcttggcctcgcgcgcagatcagttggaagaatttgttcactacgtgaaaggcgagatcaccaaggtagtcggcaaataatcactagaccaatgttacacatatatactttagattgatttaaaacttcatttttaatttaaaaggatctaggtgaagatcctttttgataatctcatgaccaaaatcccttaacgtgagttttcgttccactgagcgtcagaccccgtagaaaagatcaaaggatcttcttgagatcctttttttctgcgcgtaatctgctgcttgcaaacaaaaaaaccaccgctaccagcggtggtttgtttgccggatcaagagctaccaactcttcttccgaaggtaactggcttcagcagagcgcagataccaaatactgttcttctagtgtagccgtagttaggccaccacttcaagaactctgtagcaccgcctacatacctcgctctgctaatcctgttaccagtggctgctgccagtggcgataagtcgtgtcttaccgggttggactcaagacgatagttaccggataaggcgcagcggtcgggctgaacggggggttcgtgcacacagcccagcttggagcgaacgacctacaccgaactgagatacctacagcgtgagctatgagaaagcgccacgcttcccgaagggagaaaggcggacaggtatccggtaagcggcagggtcggaacaggagagcgcacgagggagcttccagggggaaacgcctggtatctttatagtcctgtcgggtttcgccacctctgacttgagcgtcgatttttgtgatgctcgtcaggggggcggagcctatggaaaaacgccagcaacgcggcctttttacggttcctggccttttgctggccttttgctcacatgagatctcaaacaaacacatacagcgacttagtttacccgccaatatatcctgtcaaggctcgaactaggctcggacgaagtaagcggccgcaaccttaattaaacacggcgcgccaacagcgatcgcaccaggtacc

SEQ ID NO: 274 - DNA, 7734 bp, synthetic construct
  misc_feature 1..7734: note = pAGS-0037 EF2 promoter
  source 1..7734: mol_type = other DNA
acctgtgatgcggttttggcagtacatcaatgggcgtggatagcggtttgactcacggggatttccaagtctccaccccattgacgtcaatgggagtttgttttggcaccaaaatcaacgggactttccaaaatgtcgtaacaactccgccccattgacgcaaatgggcggtaggcgtgtacggtgggaggtctatataagcagagctaacagtattcagtcgactggtaccaacaggctatggaagacgccaaaaacataaagaaaggcccggcgccattctatccgctggaagatggaaccgctggagagcaactgcataaggctatgaagagatacgccctggttcctggaacaattgcttttacagatgcacatatcgaggtggacatcacttacgctgagtacttcgaaatgtccgttcggttggcagaagctatgaaacgatatgggctgaatacaaatcacagaatcgtcgtatgcagtgaaaactctcttcaattctttatgccggtgttgggcgcgttatttatcggagttgcagttgcgcccgcgaacgacatttataatgaacgtgaattgctcaacagtatgggcatttcgcagcctaccgtggtgttcgtttccaaaaaggggttgcaaaaaattttgaacgtgcaaaaaaagctcccaatcatccaaaaaattattatcatggattctaaaacggattaccagggatttcagtcgatgtacacgttcgtcacatctcatctacctcccggttttaatgaatacgattttgtgccagagtccttcgatagggacaagacaattgcactgatcatgaactcctctggatctactggtctgcctaaaggtgtcgctctgcctcatagaactgcctgcgtgagattctcgcatgccagagatcctatttttggcaatcaaatcattccggatactgcgattttaagtgttgttccattccatcacggttttggaatgtttactacactcggatatttgatatgtggatttcgagtcgtcttaatgtatagatttgaagaagagctgtttctgaggagccttcaggattacaagattcaaagtgcgctgctggtgccaaccctattctccttcttcgccaaaagcactctgattgacaaatacgatttatctaatttacacgaaattgcttctggtggcgctcccctctctaaggaagtcggggaagcggttgccaagaggttccatctgccaggtatcaggcaaggatatgggctcactgagactacatcagctattctgattacacccgagggggatgataaaccgggcgcggtcggtaaagttgttccattttttgaagcgaaggttgtggatctggataccgggaaaacgctgggcgttaatcaaagaggcgaactgtgtgtgagaggtcctatgattatgtccggttatgtaaacaatccggaagcgaccaacgccttgattgacaaggatggatggctacattctggagacatagcttactgggacgaagacgaacacttcttcatcgttgaccgcctgaagtctctgattaagtacaaaggctatcaggtggctcccgctgaattggaatccatcttgctccaacaccccaacatcttcgacgcaggtgtcgcaggtcttcccgacgatgacgccggtgaacttcccgccgccgttgttgttttggagcacggaaagacgatgacggaaaaagagatcgtggattacgtcgccagtcaagtaacaaccgcgaaaaagttgcgcggaggagttgtgtttgtggacgaagtaccgaaaggtcttaccggaaaactcgacgcaagaaaaatcagagagatcctcataaaggccaagaagggcggaaagatcgccgtgtcaggtggatcctagataacctttaccttcattccctgtaaattggtaccctgcaaagctttcgttcgtatcatcggtttcgacaacgttcgtcaagttcaatgcatcagtttcattgcgcacacaccagaatcctactgagtttgagtattatggcattgggaaaactgtttttcttgtaccatttgttgtgcttgtaatttactgtgttttttattcggttttcgctatcgaactgtgaaatggaaatggatggagaagagttaatgaatgatatggtccttttgttcattctcaaattaatattatttgttttttctcttatttgttgtgtgttgaatttgaaattataagagatatgcaaacattttgttttgagtaaaaatgtgtcaaatcgtggcctctaatgaccgaagttaatatgaggagtaaaacacttgtagttgtaccattatgcttattcactaggcaacaaatatattttcagacctagaaaagctgcaaatgttactgaatacaagtatgtcctcttgtgttttagacatttatgaactttcctttatgtaattttccagaatccttgtcagattctaatcattgctttataattatagttatactcatggatttgtagttgagtatgaaaatattttttaatgcattttatgacttgccaattgattgacaacatgcatcaatcgactagtcgacgagtcagtaataaacggcgtcaaagtggttgcagccggcacacacgagtcgtgtttatcaactcaaagcacaaatacttttcctcaacctaaaaataaggcaattagccaaaaacaactttgcgtgtaaacaacgctcaatacacgtgtcattttattattagctattgcttcaccgccttagctttctcgtgacctagtcgtcctcgtcttttcttcttcttcttctataaaacaatacccaaagagctcttcttcttcacaattcagatttcaatttctcaaaatcttaaaaactttctctcaattctctctaccgtgatcaaggtaaatttctgtgttccttattctctcaaaatcttcgattttgttttcgttcgatcccaatttcgtatatgttctttggtttagattctgttaatcttagatcgaagacgattttctgggtttgatcgttagatatcatcttaattctcgattagggtttcatagatatcatccgatttgttcaaataatttgagttttgtcgaataattactcttcgatttgtgatttctatctagatctggtgttagtttctagtttgtgcgatcgaatttgtagattaatctgagtttttctgattaacaccacaccaatctggtaccagaaaaggggagaagcaaaaccatgggtaaaaagcctgaactcaccgcgacgtctgtcgagaagtttctgatcgaaaagttcgacagcgtctccgacctgatgcagctctcggagggcgaagaatctcgtgctttcagcttcgatgtaggagggcgtggatatgtcctgcgggtaaatagctgcgccgatggtttctacaaagatcgttatgtttatcggcactttgcatcggccgcgctcccgattccggaagtgcttgacattggggcattcagcgagagcctgacctattgcatctcccgccgtgcacagggtgtcacgttgcaagacctgcctgaaaccgaactgcccgctgttctgcaaccggtcgcggaggcgatggatgccatcgctgcggccgatcttagccagacgagcgggttcggcccattcggaccgcaaggaatcggtcaatacactacatggcgtgatttcatatgcgcgattgctgatccccatgtgtatcactggcaaactgtgatggacgacaccgtcagtgcgtccgtcgcgcaggctctcgatgagctgatgctttgggccgaggactgccccgaagtccggcacctcgtgcacgcggatttcggctccaacaatgtcctgacggacaatggccgcataacagcggtcattgactggagcgaggcgatgttcggggattcccaatacgaggtcgccaacatcttcttctggaggccgtggttggcttgtatggagcagcagacgcgctacttcgagcggaggcatccggagcttgcaggatcgccgcggctccgggcgtatatgctccgcattggtcttgaccaactctatcagagcttggttgacggcaatttcgatgatgcagcttgggcgcagggtcgatgcgacgcaatcgtccgatccggagccgggactgtcgggcgtacacaaatcgcccgcagaagcgcggccgtctggaccgatggctgtgtagaagtactcgccgatagtggaaaccgacgccccagcactcgtccgagggcaaaggaatagatgcatcctgctttaatgagatatgcgagacgcctatgatcgcatgatatttgctttcaattctgttgtgcacgttgtaaaaaacctgagcatgtgtagctcagatccttaccgccggtttcggttcattctaatgaatatatcacccgttactatcgtatttttatgaataatattctccgttcaatttactgattgtaccctactacttatatgtacaatattaaaatgaaaacaatatattgtgctgaataggtttatagcgacatctatgatagagcgccacaataacaaacaattgcgttttattattacaaatccaattttaaaaaaagcggcagaaccggtcaaacctaaaagactgattacataaatcttattcaaatttcaaaagtgccccaggggctagtatctacgacacaccgagcggcgaactaataacgctcactgaagggaactccggttccccgccggcgcgcatgggtgagattccttgaagttgagtattggccgtccgctctaccgaaagttacgggcaccattcaacccggtccagcacggcggccgggtaaccgacttgctgccccgagaattatgcagcatttttttggtgtatgtgggccccaaatgaagtgcaggtcaaaccttgacagtgacgacaaatcgttgggcgggtccagggcgaattttgcgacaacatgtcgaggctcagcaggaccggcatgcaagctagcttactagtgatattctatagtgtcacctaaatgtattctagaccaagcatgcacagctggcgttctcagccagatccaacgttacaccacaatatatcctgccaagatctaattccggggatcggaaatccagaagcccgagaggttgccgcctttcgggctttttctttttcaaaaaaaaaaatttataaaacgatctgttgcggccggccgccgggttgtgggcaaaggcgctcgacggtgggcaaccgcttgcggttgtccacgggcggagccggtgcgcgtagcgcattgtccacaagccaagggcgaccaataattgatatatatattcataattgaaaagctaattgaacatactacttgctgtaactacttgccggagcgaggggtgtttgcaagctgttgatctgaaagggctattagcgttctcacgtgcctttttgattagcgatttcacgtgaccttattagcgatttcacgtactccgattagcgatttcacgtaccctgattagcgatttcacgtggatagtttttggagcgggccggaaagccccgtgaatcaaggctttgcggggcattagcggtttcacgtggataactaccctctatccacaggcttccggggataaaaaagcccgctcgacggcgggctgttggatggggatcgcctgaatcgccccatcatccagccagaaagtgagggagccacggttgatgagagctttgttgtaggtggaccagttggtgattttgaacttttgctttgccacggaacggtctgcgttgtcgggaagatgcgtgatctgatccttcaactcagcaaaagttcgatttattcaacaaagccacgttgtgtctcaaaatctctgatgttacattgcacaagataaaaatatatcatcatgaacaataaaactgtctgcttacataaacagtaatacaaggggtgttatgagggaagcggtgatcgccgaagtatcgactcaactatcagaggtagttggcgtcatcgagcgccatctcgaaccgacgttgctggccgtacatttgtacggctccgcagtggatggcggcctgaagccacacagtgatattgatttgctggttacggtgaccgtaaggcttgatgaaacaacgcggcgagctttgatcaacgaccttttggaaacttcggcttcccctggagagagcgagattctccgcgctgtagaagtcaccattgttgtgcacgacgacatcattccgtggcgttatccagctaagcgcgaactgcaatttggagaatggcagcgcaatgacattcttgcaggtatcttcgagccagccacgatcgacattgatctggctatcttgctgacaaaagcaagagaacatagcgttgccttggtaggtccagcggcggaggaactctttgatccggttcctgaacaggatctatttgaggcgctaaatgaaaccttaacgctatggaactcgccgcccgactgggctggcgatgagcgaaatgtagtgcttacgttgtcccgcatttggtacagcgcagtaaccggcaaaatcgcgccgaaggatgtcgctgccgactgggcaatggagcgcctgccggcccagtatcagcccgtcatacttgaagctaggcaggcttatcttggacaagaagatcgcttggcctcgcgcgcagatcagttggaagaatttgttcactacgtgaaaggcgagatcaccaaggtagtcggcaaataatcactagaccaatgttacacatatatactttagattgatttaaaacttcatttttaatttaaaaggatctaggtgaagatcctttttgataatctcatgaccaaaatcccttaacgtgagttttcgttccactgagcgtcagaccccgtagaaaagatcaaaggatcttcttgagatcctttttttctgcgcgtaatctgctgcttgcaaacaaaaaaaccaccgctaccagcggtggtttgtttgccggatcaagagctaccaactcttcttccgaaggtaactggcttcagcagagcgcagataccaaatactgttcttctagtgtagccgtagttaggccaccacttcaagaactctgtagcaccgcctacatacctcgctctgctaatcctgttaccagtggctgctgccagtggcgataagtcgtgtcttaccgggttggactcaagacgatagttaccggataaggcgcagcggtcgggctgaacggggggttcgtgcacacagcccagcttggagcgaacgacctacaccgaactgagatacctacagcgtgagctatgagaaagcgccacgcttcccgaagggagaaaggcggacaggtatccggtaagcggcagggtcggaacaggagagcgcacgagggagcttccagggggaaacgcctggtatctttatagtcctgtcgggtttcgccacctctgacttgagcgtcgatttttgtgatgctcgtcaggggggcggagcctatggaaaaacgccagcaacgcggcctttttacggttcctggccttttgctggccttttgctcacatgagatctcaaacaaacacatacagcgacttagtttacccgccaatatatcctgtcaaggctcgaactaggctcggacgaagtaagcggccgcaaccttaattaaacacggcgcgccaacagcgatcgcaccaggtacc

SEQ ID NO: 275 - DNA, 8038 bp, synthetic construct
  misc_feature 1..8038: note = pAGS-0038 Histone 4 promoter
  source 1..8038: mol_type = other DNA
acctcgttacataacttacggtaaatggcccgcctggctgaccgcccaacgacccccgcccattgacgtcaataatgacgtatgttcccatagtaacgccaatagggactttccattgacgtcaatgggtggagtatttacggtaaactgcccacttggcagtacatcaagtgtatcatatgccaagtacgccccctattgacgtcaatgacggtaaatggcccgcctggcattatgcccagtacatgaccttatgggactttcctacttggcagtacatctacgtattagtcatcgctattaccatggtgatgcggttttggcagtacatcaatgggcgtggatagcggtttgactcacggggatttccaagtctccaccccattgacgtcaatgggagtttgttttggcaccaaaatcaacgggactttccaaaatgtcgtaacaactccgccccattgacgcaaatgggcggtaggcgtgtacggtgggaggtctatataagcagagctaacagtattcagtcgactggtaccaacaggctatggaagacgccaaaaacataaagaaaggcccggcgccattctatccgctggaagatggaaccgctggagagcaactgcataaggctatgaagagatacgccctggttcctggaacaattgcttttacagatgcacatatcgaggtggacatcacttacgctgagtacttcgaaatgtccgttcggttggcagaagctatgaaacgatatgggctgaatacaaatcacagaatcgtcgtatgcagtgaaaactctcttcaattctttatgccggtgttgggcgcgttatttatcggagttgcagttgcgcccgcgaacgacatttataatgaacgtgaattgctcaacagtatgggcatttcgcagcctaccgtggtgttcgtttccaaaaaggggttgcaaaaaattttgaacgtgcaaaaaaagctcccaatcatccaaaaaattattatcatggattctaaaacggattaccagggatttcagtcgatgtacacgttcgtcacatctcatctacctcccggttttaatgaatacgattttgtgccagagtccttcgatagggacaagacaattgcactgatcatgaactcctctggatctactggtctgcctaaaggtgtcgctctgcctcatagaactgcctgcgtgagattctcgcatgccagagatcctatttttggcaatcaaatcattccggatactgcgattttaagtgttgttccattccatcacggttttggaatgtttactacactcggatatttgatatgtggatttcgagtcgtcttaatgtatagatttgaagaagagctgtttctgaggagccttcaggattacaagattcaaagtgcgctgctggtgccaaccctattctccttcttcgccaaaagcactctgattgacaaatacgatttatctaatttacacgaaattgcttctggtggcgctcccctctctaaggaagtcggggaagcggttgccaagaggttccatctgccaggtatcaggcaaggatatgggctcactgagactacatcagctattctgattacacccgagggggatgataaaccgggcgcggtcggtaaagttgttccattttttgaagcgaaggttgtggatctggataccgggaaaacgctgggcgttaatcaaagaggcgaactgtgtgtgagaggtcctatgattatgtccggttatgtaaacaatccggaagcgaccaacgccttgattgacaaggatggatggctacattctggagacatagcttactgggacgaagacgaacacttcttcatcgttgaccgcctgaagtctctgattaagtacaaaggctatcaggtggctcccgctgaattggaatccatcttgctccaacaccccaacatcttcgacgcaggtgtcgcaggtcttcccgacgatgacgccggtgaacttcccgccgccgttgttgttttggagcacggaaagacgatgacggaaaaagagatcgtggattacgtcgccagtcaagtaacaaccgcgaaaaagttgcgcggaggagttgtgtttgtggacgaagtaccgaaaggtcttaccggaaaactcgacgcaagaaaaatcagagagatcctcataaaggccaagaagggcggaaagatcgccgtgtcaggtggatcctagataacctttaccttcattccctgtaaattggtaccctgcaaagctttcgttcgtatcatcggtttcgacaacgttcgtcaagttcaatgcatcagtttcattgcgcacacaccagaatcctactgagtttgagtattatggcattgggaaaactgtttttcttgtaccatttgttgtgcttgtaatttactgtgttttttattcggttttcgctatcgaactgtgaaatggaaatggatggagaagagttaatgaatgatatggtccttttgttcattctcaaattaatattatttgttttttctcttatttgttgtgtgttgaatttgaaattataagagatatgcaaacattttgttttgagtaaaaatgtgtcaaatcgtggcctctaatgaccgaagttaatatgaggagtaaaacacttgtagttgtaccattatgcttattcactaggcaacaaatatattttcagacctagaaaagctgcaaatgttactgaatacaagtatgtcctcttgtgttttagacatttatgaactttcctttatgtaattttccagaatccttgtcagattctaatcattgctttataattatagttatactcatggatttgtagttgagtatgaaaatattttttaatgcattttatgacttgccaattgattgacaacatgcatcaatcgactagtcgacgagtcagtaataaacggcgtcaaagtggttgcagccggcacacacgagtcgtgtttatcaactcaaagcacaaatacttttcctcaacctaaaaataaggcaattagccaaaaacaactttgcgtgtaaacaacgctcaatacacgtgtcattttattattagctattgcttcaccgccttagctttctcgtgacctagtcgtcctcgtcttttcttcttcttcttctataaaacaatacccaaagagctcttcttcttcacaattcagatttcaatttctcaaaatcttaaaaactttctctcaattctctctaccgtgatcaaggtaaatttctgtgttccttattctctcaaaatcttcgattttgttttcgttcgatcccaatttcgtatatgttctttggtttagattctgttaatcttagatcgaagacgattttctgggtttgatcgttagatatcatcttaattctcgattagggtttcatagatatcatccgatttgttcaaataatttgagttttgtcgaataattactcttcgatttgtgatttctatctagatctggtgttagtttctagtttgtgcgatcgaatttgtagattaatctgagtttttctgattaacaccacaccaatctggtaccagaaaaggggagaagcaaaaccatgggtaaaaagcctgaactcaccgcgacgtctgtcgagaagtttctgatcgaaaagttcgacagcgtctccgacctgatgcagctctcggagggcgaagaatctcgtgctttcagcttcgatgtaggagggcgtggatatgtcctgcgggtaaatagctgcgccgatggtttctacaaagatcgttatgtttatcggcactttgcatcggccgcgctcccgattccggaagtgcttgacattggggcattcagcgagagcctgacctattgcatctcccgccgtgcacagggtgtcacgttgcaagacctgcctgaaaccgaactgcccgctgttctgcaaccggtcgcggaggcgatggatgccatcgctgcggccgatcttagccagacgagcgggttcggcccattcggaccgcaaggaatcggtcaatacactacatggcgtgatttcatatgcgcgattgctgatccccatgtgtatcactggcaaactgtgatggacgacaccgtcagtgcgtccgtcgcgcaggctctcgatgagctgatgctttgggccgaggactgccccgaagtccggcacctcgtgcacgcggatttcggctccaacaatgtcctgacggacaatggccgcataacagcggtcattgactggagcgaggcgatgttcggggattcccaatacgaggtcgccaacatcttcttctggaggccgtggttggcttgtatggagcagcagacgcgctacttcgagcggaggcatccggagcttgcaggatcgccgcggctccgggcgtatatgctccgcattggtcttgaccaactctatcagagcttggttgacggcaatttcgatgatgcagcttgggcgcagggtcgatgcgacgcaatcgtccgatccggagccgggactgtcgggcgtacacaaatcgcccgcagaagcgcggccgtctggaccgatggctgtgtagaagtactcgccgatagtggaaaccgacgccccagcactcgtccgagggcaaaggaatagatgcatcctgctttaatgagatatgcgagacgcctatgatcgcatgatatttgctttcaattctgttgtgcacgttgtaaaaaacctgagcatgtgtagctcagatccttaccgccggtttcggttcattctaatgaatatatcacccgttactatcgtatttttatgaataatattctccgttcaatttactgattgtaccctactacttatatgtacaatattaaaatgaaaacaatatattgtgctgaataggtttatagcgacatctatgatagagcgccacaataacaaacaattgcgttttattattacaaatccaattttaaaaaaagcggcagaaccggtcaaacctaaaagactgattacataaatcttattcaaatttcaaaagtgccccaggggctagtatctacgacacaccgagcggcgaactaataacgctcactgaagggaactccggttccccgccggcgcgcatgggtgagattccttgaagttgagtattggccgtccgctctaccgaaagttacgggcaccattcaacccggtccagcacggcggccgggtaaccgacttgctgccccgagaattatgcagcatttttttggtgtatgtgggccccaaatgaagtgcaggtcaaaccttgacagtgacgacaaatcgttgggcgggtccagggcgaattttgcgacaacatgtcgaggctcagcaggaccggcatgcaagctagcttactagtgatattctatagtgtcacctaaatgtattctagaccaagcatgcacagctggcgttctcagccagatccaacgttacaccacaatatatcctgccaagatctaattccggggatcggaaatccagaagcccgagaggttgccgcctttcgggctttttctttttcaaaaaaaaaaatttataaaacgatctgttgcggccggccgccgggttgtgggcaaaggcgctcgacggtgggcaaccgcttgcggttgtccacgggcggagccggtgcgcgtagcgcattgtccacaagccaagggcgaccaataattgatatatatattcataattgaaaagctaattgaacatactacttgctgtaactacttgccggagcgaggggtgtttgcaagctgttgatctgaaagggctattagcgttctcacgtgcctttttgattagcgatttcacgtgaccttattagcgatttcacgtactccgattagcgatttcacgtaccctgattagcgatttcacgtggatagtttttggagcgggccggaaagccccgtgaatcaaggctttgcggggcattagcggtttcacgtggataactaccctctatccacaggcttccggggataaaaaagcccgctcgacggcgggctgttggatggggatcgcctgaatcgccccatcatccagccagaaagtgagggagccacggttgatgagagctttgttgtaggtggaccagttggtgattttgaacttttgctttgccacggaacggtctgcgttgtcgggaagatgcgtgatctgatccttcaactcagcaaaagttcgatttattcaacaaagccacgttgtgtctcaaaatctctgatgttacattgcacaagataaaaatatatcatcatgaacaataaaactgtctgcttacataaacagtaatacaaggggtgttatgagggaagcggtgatcgccgaagtatcgactcaactatcagaggtagttggcgtcatcgagcgccatctcgaaccgacgttgctggccgtacatttgtacggctccgcagtggatggcggcctgaagccacacagtgatattgatttgctggttacggtgaccgtaaggcttgatgaaacaacgcggcgagctttgatcaacgaccttttggaaacttcggcttcccctggagagagcgagattctccgcgctgtagaagtcaccattgttgtgcacgacgacatcattccgtggcgttatccagctaagcgcgaactgcaatttggagaatggcagcgcaatgacattcttgcaggtatcttcgagccagccacgatcgacattgatctggctatcttgctgacaaaagcaagagaacatagcgttgccttggtaggtccagcggcggaggaactctttgatccggttcctgaacaggatctatttgaggcgctaaatgaaaccttaacgctatggaactcgccgcccgactgggctggcgatgagcgaaatgtagtgcttacgttgtcccgcatttggtacagcgcagtaaccggcaaaatcgcgccgaaggatgtcgctgccgactgggcaatggagcgcctgccggcccagtatcagcccgtcatacttgaagctaggcaggcttatcttggacaagaagatcgcttggcctcgcgcgcagatcagttggaagaatttgttcactacgtgaaaggcgagatcaccaaggtagtcggcaaataatcactagaccaatgttacacatatatactttagattgatttaaaacttcatttttaatttaaaaggatctaggtgaagatcctttttgataatctcatgaccaaaatcccttaacgtgagttttcgttccactgagcgtcagaccccgtagaaaagatcaaaggatcttcttgagatcctttttttctgcgcgtaatctgctgcttgcaaacaaaaaaaccaccgctaccagcggtggtttgtttgccggatcaagagctaccaactcttcttccgaaggtaactggcttcagcagagcgcagataccaaatactgttcttctagtgtagccgtagttaggccaccacttcaagaactctgtagcaccgcctacatacctcgctctgctaatcctgttaccagtggctgctgccagtggcgataagtcgtgtcttaccgggttggactcaagacgatagttaccggataaggcgcagcggtcgggctgaacggggggttcgtgcacacagcccagcttggagcgaacgacctacaccgaactgagatacctacagcgtgagctatgagaaagcgccacgcttcccgaagggagaaaggcggacaggtatccggtaagcggcagggtcggaacaggagagcgcacgagggagcttccagggggaaacgcctggtatctttatagtcctgtcgggtttcgccacctctgacttgagcgtcgatttttgtgatgctcgtcaggggggcggagcctatggaaaaacgccagcaacgcggcctttttacggttcctggccttttgctggccttttgctcacatgagatctcaaacaaacacatacagcgacttagtttacccgccaatatatcctgtcaaggctcgaactaggctcggacgaagtaagcggccgcaaccttaattaaacacggcgcgccaacagcgatcgcaccaggtacc

SEQ ID NO: 276 - DNA, 7888 bp, synthetic construct
  misc_feature 1..7888: note = pAGS-0039 Lhcf.1 promoter
  source 1..7888: mol_type = other DNA
acctctgaggcggaaagaaccagctgtggaatgtgtgtcagttagggtgtggaaagtccccaggctccccagcaggcagaagtatgcaaagcatgcatctcaattagtcagcaaccaggtgtggaaagtccccaggctccccagcaggcagaagtatgcaaagcatgcatctcaattagtcagcaaccatagtcccgcccctaactccgcccatcccgcccctaactccgcccagttccgcccattctccgccccatggctgactaattttttttatttatgcagaggccgaggccgcctcggcctctgagctattccagaagtagtgaggaggcttttttggaggcctaggcttttgcaaaaacagtattcagtcgactggtaccaacaggctatggaagacgccaaaaacataaagaaaggcccggcgccattctatccgctggaagatggaaccgctggagagcaactgcataaggctatgaagagatacgccctggttcctggaacaattgcttttacagatgcacatatcgaggtggacatcacttacgctgagtacttcgaaatgtccgttcggttggcagaagctatgaaacgatatgggctgaatacaaatcacagaatcgtcgtatgcagtgaaaactctcttcaattctttatgccggtgttgggcgcgttatttatcggagttgcagttgcgcccgcgaacgacatttataatgaacgtgaattgctcaacagtatgggcatttcgcagcctaccgtggtgttcgtttccaaaaaggggttgcaaaaaattttgaacgtgcaaaaaaagctcccaatcatccaaaaaattattatcatggattctaaaacggattaccagggatttcagtcgatgtacacgttcgtcacatctcatctacctcccggttttaatgaatacgattttgtgccagagtccttcgatagggacaagacaattgcactgatcatgaactcctctggatctactggtctgcctaaaggtgtcgctctgcctcatagaactgcctgcgtgagattctcgcatgccagagatcctatttttggcaatcaaatcattccggatactgcgattttaagtgttgttccattccatcacggttttggaatgtttactacactcggatatttgatatgtggatttcgagtcgtcttaatgtatagatttgaagaagagctgtttctgaggagccttcaggattacaagattcaaagtgcgctgctggtgccaaccctattctccttcttcgccaaaagcactctgattgacaaatacgatttatctaatttacacgaaattgcttctggtggcgctcccctctctaaggaagtcggggaagcggttgccaagaggttccatctgccaggtatcaggcaaggatatgggctcactgagactacatcagctattctgattacacccgagggggatgataaaccgggcgcggtcggtaaagttgttccattttttgaagcgaaggttgtggatctggataccgggaaaacgctgggcgttaatcaaagaggcgaactgtgtgtgagaggtcctatgattatgtccggttatgtaaacaatccggaagcgaccaacgccttgattgacaaggatggatggctacattctggagacatagcttactgggacgaagacgaacacttcttcatcgttgaccgcctgaagtctctgattaagtacaaaggctatcaggtggctcccgctgaattggaatccatcttgctccaacaccccaacatcttcgacgcaggtgtcgcaggtcttcccgacgatgacgccggtgaacttcccgccgccgttgttgttttggagcacggaaagacgatgacggaaaaagagatcgtggattacgtcgccagtcaagtaacaaccgcgaaaaagttgcgcggaggagttgtgtttgtggacgaagtaccgaaaggtcttaccggaaaactcgacgcaagaaaaatcagagagatcctcataaaggccaagaagggcggaaagatcgccgtgtcaggtggatcctagataacctttaccttcattccctgtaaattggtaccctgcaaagctttcgttcgtatcatcggtttcgacaacgttcgtcaagttcaatgcatcagtttcattgcgcacacaccagaatcctactgagtttgagtattatggcattgggaaaactgtttttcttgtaccatttgttgtgcttgtaatttactgtgttttttattcggttttcgctatcgaactgtgaaatggaaatggatggagaagagttaatgaatgatatggtccttttgttcattctcaaattaatattatttgttttttctcttatttgttgtgtgttgaatttgaaattataagagatatgcaaacattttgttttgagtaaaaatgtgtcaaatcgtggcctctaatgaccgaagttaatatgaggagtaaaacacttgtagttgtaccattatgcttattcactaggcaacaaatatattttcagacctagaaaagctgcaaatgttactgaatacaagtatgtcctcttgtgttttagacatttatgaactttcctttatgtaattttccagaatccttgtcagattctaatcattgctttataattatagttatactcatggatttgtagttgagtatgaaaatattttttaatgcattttatgacttgccaattgattgacaacatgcatcaatcgactagtcgacgagtcagtaataaacggcgtcaaagtggttgcagccggcacacacgagtcgtgtttatcaactcaaagcacaaatacttttcctcaacctaaaaataaggcaattagccaaaaacaactttgcgtgtaaacaacgctcaatacacgtgtcattttattattagctattgcttcaccgccttagctttctcgtgacctagtcgtcctcgtcttttcttcttcttcttctataaaacaatacccaaagagctcttcttcttcacaattcagatttcaatttctcaaaatcttaaaaactttctctcaattctctctaccgtgatcaaggtaaatttctgtgttccttattctctcaaaatcttcgattttgttttcgttcgatcccaatttcgtatatgttctttggtttagattctgttaatcttagatcgaagacgattttctgggtttgatcgttagatatcatcttaattctcgattagggtttcatagatatcatccgatttgttcaaataatttgagttttgtcgaataattactcttcgatttgtgatttctatctagatctggtgttagtttctagtttgtgcgatcgaatttgtagattaatctgagtttttctgattaacaccacaccaatctggtaccagaaaaggggagaagcaaaaccatgggtaaaaagcctgaactcaccgcgacgtctgtcgagaagtttctgatcgaaaagttcgacagcgtctccgacctgatgcagctctcggagggcgaagaatctcgtgctttcagcttcgatgtaggagggcgtggatatgtcctgcgggtaaatagctgcgccgatggtttctacaaagatcgttatgtttatcggcactttgcatcggccgcgctcccgattccggaagtgcttgacattggggcattcagcgagagcctgacctattgcatctcccgccgtgcacagggtgtcacgttgcaagacctgcctgaaaccgaactgcccgctgttctgcaaccggtcgcggaggcgatggatgccatcgctgcggccgatcttagccagacgagcgggttcggcccattcggaccgcaaggaatcggtcaatacactacatggcgtgatttcatatgcgcgattgctgatccccatgtgtatcactggcaaactgtgatggacgacaccgtcagtgcgtccgtcgcgcaggctctcgatgagctgatgctttgggccgaggactgccccgaagtccggcacctcgtgcacgcggatttcggctccaacaatgtcctgacggacaatggccgcataacagcggtcattgactggagcgaggcgatgttcggggattcccaatacgaggtcgccaacatcttcttctggaggccgtggttggcttgtatggagcagcagacgcgctacttcgagcggaggcatccggagcttgcaggatcgccgcggctccgggcgtatatgctccgcattggtcttgaccaactctatcagagcttggttgacggcaatttcgatgatgcagcttgggcgcagggtcgatgcgacgcaatcgtccgatccggagccgggactgtcgggcgtacacaaatcgcccgcagaagcgcggccgtctggaccgatggctgtgtagaagtactcgccgatagtggaaaccgacgccccagcactcgtccgagggcaaaggaatagatgcatcctgctttaatgagatatgcgagacgcctatgatcgcatgatatttgctttcaattctgttgtgcacgttgtaaaaaacctgagcatgtgtagctcagatccttaccgccggtttcggttcattctaatgaatatatcacccgttactatcgtatttttatgaataatattctccgttcaatttactgattgtaccctactacttatatgtacaatattaaaatgaaaacaatatattgtgctgaataggtttatagcgacatctatgatagagcgccacaataacaaacaattgcgttttattattacaaatccaattttaaaaaaagcggcagaaccggtcaaacctaaaagactgattacataaatcttattcaaatttcaaaagtgccccaggggctagtatctacgacacaccgagcggcgaactaataacgctcactgaagggaactccggttccccgccggcgcgcatgggtgagattccttgaagttgagtattggccgtccgctctaccgaaagttacgggcaccattcaacccggtccagcacggcggccgggtaaccgacttgctgccccgagaattatgcagcatttttttggtgtatgtgggccccaaatgaagtgcaggtcaaaccttgacagtgacgacaaatcgttgggcgggtccagggcgaattttgcgacaacatgtcgaggctcagcaggaccggcatgcaagctagcttactagtgatattctatagtgtcacctaaatgtattctagaccaagcatgcacagctggcgttctcagccagatccaacgttacaccacaatatatcctgccaagatctaattccggggatcggaaatccagaagcccgagaggttgccgcctttcgggctttttctttttcaaaaaaaaaaatttataaaacgatctgttgcggccggccgccgggttgtgggcaaaggcgctcgacggtgggcaaccgcttgcggttgtccacgggcggagccggtgcgcgtagcgcattgtccacaagccaagggcgaccaataattgatatatatattcataattgaaaagctaattgaacatactacttgctgtaactacttgccggagcgaggggtgtttgcaagctgttgatctgaaagggctattagcgttctcacgtgcctttttgattagcgatttcacgtgaccttattagcgatttcacgtactccgattagcgatttcacgtaccctgattagcgatttcacgtggatagtttttggagcgggccggaaagccccgtgaatcaaggctttgcggggcattagcggtttcacgtggataactaccctctatccacaggcttccggggataaaaaagcccgctcgacggcgggctgttggatggggatcgcctgaatcgccccatcatccagccagaaagtgagggagccacggttgatgagagctttgttgtaggtggaccagttggtgattttgaacttttgctttgccacggaacggtctgcgttgtcgggaagatgcgtgatctgatccttcaactcagcaaaagttcgatttattcaacaaagccacgttgtgtctcaaaatctctgatgttacattgcacaagataaaaatatatcatcatgaacaataaaactgtctgcttacataaacagtaatacaaggggtgttatgagggaagcggtgatcgccgaagtatcgactcaactatcagaggtagttggcgtcatcgagcgccatctcgaaccgacgttgctggccgtacatttgtacggctccgcagtggatggcggcctgaagccacacagtgatattgatttgctggttacggtgaccgtaaggcttgatgaaacaacgcggcgagctttgatcaacgaccttttggaaacttcggcttcccctggagagagcgagattctccgcgctgtagaagtcaccattgttgtgcacgacgacatcattccgtggcgttatccagctaagcgcgaactgcaatttggagaatggcagcgcaatgacattcttgcaggtatcttcgagccagccacgatcgacattgatctggctatcttgctgacaaaagcaagagaacatagcgttgccttggtaggtccagcggcggaggaactctttgatccggttcctgaacaggatctatttgaggcgctaaatgaaaccttaacgctatggaactcgccgcccgactgggctggcgatgagcgaaatgtagtgcttacgttgtcccgcatttggtacagcgcagtaaccggcaaaatcgcgccgaaggatgtcgctgccgactgggcaatggagcgcctgccggcccagtatcagcccgtcatacttgaagctaggcaggcttatcttggacaagaagatcgcttggcctcgcgcgcagatcagttggaagaatttgttcactacgtgaaaggcgagatcaccaaggtagtcggcaaataatcactagaccaatgttacacatatatactttagattgatttaaaacttcatttttaatttaaaaggatctaggtgaagatcctttttgataatctcatgaccaaaatcccttaacgtgagttttcgttccactgagcgtcagaccccgtagaaaagatcaaaggatcttcttgagatcctttttttctgcgcgtaatctgctgcttgcaaacaaaaaaaccaccgctaccagcggtggtttgtttgccggatcaagagctaccaactcttcttccgaaggtaactggcttcagcagagcgcagataccaaatactgttcttctagtgtagccgtagttaggccaccacttcaagaactctgtagcaccgcctacatacctcgctctgctaatcctgttaccagtggctgctgccagtggcgataagtcgtgtcttaccgggttggactcaagacgatagttaccggataaggcgcagcggtcgggctgaacggggggttcgtgcacacagcccagcttggagcgaacgacctacaccgaactgagatacctacagcgtgagctatgagaaagcgccacgcttcccgaagggagaaaggcggacaggtatccggtaagcggcagggtcggaacaggagagcgcacgagggagcttccagggggaaacgcctggtatctttatagtcctgtcgggtttcgccacctctgacttgagcgtcgatttttgtgatgctcgtcaggggggcggagcctatggaaaaacgccagcaacgcggcctttttacggttcctggccttttgctggccttttgctcacatgagatctcaaacaaacacatacagcgacttagtttacccgccaatatatcctgtcaaggctcgaactaggctcggacgaagtaagcggccgcaaccttaattaaacacggcgcgccaacagcgatcgcaccaggtacc

SEQ ID NO: 277 - DNA, 7994 bp, synthetic construct
  misc_feature 1..7994: note = pAGS-0040 Ubi.U4 promoter
  source 1..7994: mol_type = other DNA
acctcgcggaacccctatttgtttatttttctaaatacattcaaatatgtatccgctcatgagacaataaccctgataaatgcttcaataatattgaaaaaggaagagtcctgaggcggaaagaaccagctgtggaatgtgtgtcagttagggtgtggaaagtccccaggctccccagcaggcagaagtatgcaaagcatgcatctcaattagtcagcaaccaggtgtggaaagtccccaggctccccagcaggcagaagtatgcaaagcatgcatctcaattagtcagcaaccatagtcccgcccctaactccgcccatcccgcccctaactccgcccagttccgcccattctccgccccatggctgactaattttttttatttatgcagaggccgaggccgcctcggcctctgagctattccagaagtagtgaggaggcttttttggaggcctaggcttttgcaaaaacagtattcagtcgactggtaccaacaggctatggaagacgccaaaaacataaagaaaggcccggcgccattctatccgctggaagatggaaccgctggagagcaactgcataaggctatgaagagatacgccctggttcctggaacaattgcttttacagatgcacatatcgaggtggacatcacttacgctgagtacttcgaaatgtccgttcggttggcagaagctatgaaacgatatgggctgaatacaaatcacagaatcgtcgtatgcagtgaaaactctcttcaattctttatgccggtgttgggcgcgttatttatcggagttgcagttgcgcccgcgaacgacatttataatgaacgtgaattgctcaacagtatgggcatttcgcagcctaccgtggtgttcgtttccaaaaaggggttgcaaaaaattttgaacgtgcaaaaaaagctcccaatcatccaaaaaattattatcatggattctaaaacggattaccagggatttcagtcgatgtacacgttcgtcacatctcatctacctcccggttttaatgaatacgattttgtgccagagtccttcgatagggacaagacaattgcactgatcatgaactcctctggatctactggtctgcctaaaggtgtcgctctgcctcatagaactgcctgcgtgagattctcgcatgccagagatcctatttttggcaatcaaatcattccggatactgcgattttaagtgttgttccattccatcacggttttggaatgtttactacactcggatatttgatatgtggatttcgagtcgtcttaatgtatagatttgaagaagagctgtttctgaggagccttcaggattacaagattcaaagtgcgctgctggtgccaaccctattctccttcttcgccaaaagcactctgattgacaaatacgatttatctaatttacacgaaattgcttctggtggcgctcccctctctaaggaagtcggggaagcggttgccaagaggttccatctgccaggtatcaggcaaggatatgggctcactgagactacatcagctattctgattacacccgagggggatgataaaccgggcgcggtcggtaaagttgttccattttttgaagcgaaggttgtggatctggataccgggaaaacgctgggcgttaatcaaagaggcgaactgtgtgtgagaggtcctatgattatgtccggttatgtaaacaatccggaagcgaccaacgccttgattgacaaggatggatggctacattctggagacatagcttactgggacgaagacgaacacttcttcatcgttgaccgcctgaagtctctgattaagtacaaaggctatcaggtggctcccgctgaattggaatccatcttgctccaacaccccaacatcttcgacgcaggtgtcgcaggtcttcccgacgatgacgccggtgaacttcccgccgccgttgttgttttggagcacggaaagacgatgacggaaaaagagatcgtggattacgtcgccagtcaagtaacaaccgcgaaaaagttgcgcggaggagttgtgtttgtggacgaagtaccgaaaggtcttaccggaaaactcgacgcaagaaaaatcagagagatcctcataaaggccaagaagggcggaaagatcgccgtgtcaggtggatcctagataacctttaccttcattccctgtaaattggtaccctgcaaagctttcgttcgtatcatcggtttcgacaacgttcgtcaagttcaatgcatcagtttcattgcgcacacaccagaatcctactgagtttgagtattatggcattgggaaaactgtttttcttgtaccatttgttgtgcttgtaatttactgtgttttttattcggttttcgctatcgaactgtgaaatggaaatggatggagaagagttaatgaatgatatggtccttttgttcattctcaaattaatattatttgttttttctcttatttgttgtgtgttgaatttgaaattataagagatatgcaaacattttgttttgagtaaaaatgtgtcaaatcgtggcctctaatgaccgaagttaatatgaggagtaaaacacttgtagttgtaccattatgcttattcactaggcaacaaatatattttcagacctagaaaagctgcaaatgttactgaatacaagtatgtcctcttgtgttttagacatttatgaactttcctttatgtaattttccagaatccttgtcagattctaatcattgctttataattatagttatactcatggatttgtagttgagtatgaaaatattttttaatgcattttatgacttgccaattgattgacaacatgcatcaatcgactagtcgacgagtcagtaataaacggcgtcaaagtggttgcagccggcacacacgagtcgtgtttatcaactcaaagcacaaatacttttcctcaacctaaaaataaggcaattagccaaaaacaactttgcgtgtaaacaacgctcaatacacgtgtcattttattattagctattgcttcaccgccttagctttctcgtgacctagtcgtcctcgtcttttcttcttcttcttctataaaacaatacccaaagagctcttcttcttcacaattcagatttcaatttctcaaaatcttaaaaactttctctcaattctctctaccgtgatcaaggtaaatttctgtgttccttattctctcaaaatcttcgattttgttttcgttcgatcccaatttcgtatatgttctttggtttagattctgttaatcttagatcgaagacgattttctgggtttgatcgttagatatcatcttaattctcgattagggtttcatagatatcatccgatttgttcaaataatttgagttttgtcgaataattactcttcgatttgtgatttctatctagatctggtgttagtttctagtttgtgcgatcgaatttgtagattaatctgagtttttctgattaacaccacaccaatctggtaccagaaaaggggagaagcaaaaccatgggtaaaaagcctgaactcaccgcgacgtctgtcgagaagtttctgatcgaaaagttcgacagcgtctccgacctgatgcagctctcggagggcgaagaatctcgtgctttcagcttcgatgtaggagggcgtggatatgtcctgcgggtaaatagctgcgccgatggtttctacaaagatcgttatgtttatcggcactttgcatcggccgcgctcccgattccggaagtgcttgacattggggcattcagcgagagcctgacctattgcatctcccgccgtgcacagggtgtcacgttgcaagacctgcctgaaaccgaactgcccgctgttctgcaaccggtcgcggaggcgatggatgccatcgctgcggccgatcttagccagacgagcgggttcggcccattcggaccgcaaggaatcggtcaatacactacatggcgtgatttcatatgcgcgattgctgatccccatgtgtatcactggcaaactgtgatggacgacaccgtcagtgcgtccgtcgcgcaggctctcgatgagctgatgctttgggccgaggactgccccgaagtccggcacctcgtgcacgcggatttcggctccaacaatgtcctgacggacaatggccgcataacagcggtcattgactggagcgaggcgatgttcggggattcccaatacgaggtcgccaacatcttcttctggaggccgtggttggcttgtatggagcagcagacgcgctacttcgagcggaggcatccggagcttgcaggatcgccgcggctccgggcgtatatgctccgcattggtcttgaccaactctatcagagcttggttgacggcaatttcgatgatgcagcttgggcgcagggtcgatgcgacgcaatcgtccgatccggagccgggactgtcgggcgtacacaaatcgcccgcagaagcgcggccgtctggaccgatggctgtgtagaagtactcgccgatagtggaaaccgacgccccagcactcgtccgagggcaaaggaatagatgcatcctgctttaatgagatatgcgagacgcctatgatcgcatgatatttgctttcaattctgttgtgcacgttgtaaaaaacctgagcatgtgtagctcagatccttaccgccggtttcggttcattctaatgaatatatcacccgttactatcgtatttttatgaataatattctccgttcaatttactgattgtaccctactacttatatgtacaatattaaaatgaaaacaatatattgtgctgaataggtttatagcgacatctatgatagagcgccacaataacaaacaattgcgttttattattacaaatccaattttaaaaaaagcggcagaaccggtcaaacctaaaagactgattacataaatcttattcaaatttcaaaagtgccccaggggctagtatctacgacacaccgagcggcgaactaataacgctcactgaagggaactccggttccccgccggcgcgcatgggtgagattccttgaagttgagtattggccgtccgctctaccgaaagttacgggcaccattcaacccggtccagcacggcggccgggtaaccgacttgctgccccgagaattatgcagcatttttttggtgtatgtgggccccaaatgaagtgcaggtcaaaccttgacagtgacgacaaatcgttgggcgggtccagggcgaattttgcgacaacatgtcgaggctcagcaggaccggcatgcaagctagcttactagtgatattctatagtgtcacctaaatgtattctagaccaagcatgcacagctggcgttctcagccagatccaacgttacaccacaatatatcctgccaagatctaattccggggatcggaaatccagaagcccgagaggttgccgcctttcgggctttttctttttcaaaaaaaaaaatttataaaacgatctgttgcggccggccgccgggttgtgggcaaaggcgctcgacggtgggcaaccgcttgcggttgtccacgggcggagccggtgcgcgtagcgcattgtccacaagccaagggcgaccaataattgatatatatattcataattgaaaagctaattgaacatactacttgctgtaactacttgccggagcgaggggtgtttgcaagctgttgatctgaaagggctattagcgttctcacgtgcctttttgattagcgatttcacgtgaccttattagcgatttcacgtactccgattagcgatttcacgtaccctgattagcgatttcacgtggatagtttttggagcgggccggaaagccccgtgaatcaaggctttgcggggcattagcggtttcacgtggataactaccctctatccacaggcttccggggataaaaaagcccgctcgacggcgggctgttggatggggatcgcctgaatcgccccatcatccagccagaaagtgagggagccacggttgatgagagctttgttgtaggtggaccagttggtgattttgaacttttgctttgccacggaacggtctgcgttgtcgggaagatgcgtgatctgatccttcaactcagcaaaagttcgatttattcaacaaagccacgttgtgtctcaaaatctctgatgttacattgcacaagataaaaatatatcatcatgaacaataaaactgtctgcttacataaacagtaatacaaggggtgttatgagggaagcggtgatcgccgaagtatcgactcaactatcagaggtagttggcgtcatcgagcgccatctcgaaccgacgttgctggccgtacatttgtacggctccgcagtggatggcggcctgaagccacacagtgatattgatttgctggttacggtgaccgtaaggcttgatgaaacaacgcggcgagctttgatcaacgaccttttggaaacttcggcttcccctggagagagcgagattctccgcgctgtagaagtcaccattgttgtgcacgacgacatcattccgtggcgttatccagctaagcgcgaactgcaatttggagaatggcagcgcaatgacattcttgcaggtatcttcgagccagccacgatcgacattgatctggctatcttgctgacaaaagcaagagaacatagcgttgccttggtaggtccagcggcggaggaactctttgatccggttcctgaacaggatctatttgaggcgctaaatgaaaccttaacgctatggaactcgccgcccgactgggctggcgatgagcgaaatgtagtgcttacgttgtcccgcatttggtacagcgcagtaaccggcaaaatcgcgccgaaggatgtcgctgccgactgggcaatggagcgcctgccggcccagtatcagcccgtcatacttgaagctaggcaggcttatcttggacaagaagatcgcttggcctcgcgcgcagatcagttggaagaatttgttcactacgtgaaaggcgagatcaccaaggtagtcggcaaataatcactagaccaatgttacacatatatactttagattgatttaaaacttcatttttaatttaaaaggatctaggtgaagatcctttttgataatctcatgaccaaaatcccttaacgtgagttttcgttccactgagcgtcagaccccgtagaaaagatcaaaggatcttcttgagatcctttttttctgcgcgtaatctgctgcttgcaaacaaaaaaaccaccgctaccagcggtggtttgtttgccggatcaagagctaccaactcttcttccgaaggtaactggcttcagcagagcgcagataccaaatactgttcttctagtgtagccgtagttaggccaccacttcaagaactctgtagcaccgcctacatacctcgctctgctaatcctgttaccagtggctgctgccagtggcgataagtcgtgtcttaccgggttggactcaagacgatagttaccggataaggcgcagcggtcgggctgaacggggggttcgtgcacacagcccagcttggagcgaacgacctacaccgaactgagatacctacagcgtgagctatgagaaagcgccacgcttcccgaagggagaaaggcggacaggtatccggtaagcggcagggtcggaacaggagagcgcacgagggagcttccagggggaaacgcctggtatctttatagtcctgtcgggtttcgccacctctgacttgagcgtcgatttttgtgatgctcgtcaggggggcggagcctatggaaaaacgccagcaacgcggcctttttacggttcctggccttttgctggccttttgctcacatgagatctcaaacaaacacatacagcgacttagtttacccgccaatatatcctgtcaaggctcgaactaggctcggacgaagtaagcggccgcaaccttaattaaacacggcgcgccaacagcgatcgcaccaggtacc

SEQ ID NO: 278 - DNA, 7854 bp, synthetic construct
  misc_feature 1..7854: note = pAGS-0041 CAM 35S promoter
  source 1..7854: mol_type = other DNA
accttccattttgacatgtttcctagctagaaggaacagctattcatatgaattttccgaggtcacgctgtgatggatcgattcgttcccgtcacagacgcaagcagcgaggtgatggctggacgggcacgcgtcacaatttagaacaacccggactcttgtgacgcgagctccgggtgcggaaaaccctacggggtgaaaggagccgcagcttccacccatttacttgactgataacccagtacacacaacgctaccgtgacggaaatgccgcgcgctgtgaagccgtggtgaatctttcgctgctgctcgttctctccacacacacaacagtattcagtcgactggtaccaacaggctatggaagacgccaaaaacataaagaaaggcccggcgccattctatccgctggaagatggaaccgctggagagcaactgcataaggctatgaagagatacgccctggttcctggaacaattgcttttacagatgcacatatcgaggtggacatcacttacgctgagtacttcgaaatgtccgttcggttggcagaagctatgaaacgatatgggctgaatacaaatcacagaatcgtcgtatgcagtgaaaactctcttcaattctttatgccggtgttgggcgcgttatttatcggagttgcagttgcgcccgcgaacgacatttataatgaacgtgaattgctcaacagtatgggcatttcgcagcctaccgtggtgttcgtttccaaaaaggggttgcaaaaaattttgaacgtgcaaaaaaagctcccaatcatccaaaaaattattatcatggattctaaaacggattaccagggatttcagtcgatgtacacgttcgtcacatctcatctacctcccggttttaatgaatacgattttgtgccagagtccttcgatagggacaagacaattgcactgatcatgaactcctctggatctactggtctgcctaaaggtgtcgctctgcctcatagaactgcctgcgtgagattctcgcatgccagagatcctatttttggcaatcaaatcattccggatactgcgattttaagtgttgttccattccatcacggttttggaatgtttactacactcggatatttgatatgtggatttcgagtcgtcttaatgtatagatttgaagaagagctgtttctgaggagccttcaggattacaagattcaaagtgcgctgctggtgccaaccctattctccttcttcgccaaaagcactctgattgacaaatacgatttatctaatttacacgaaattgcttctggtggcgctcccctctctaaggaagtcggggaagcggttgccaagaggttccatctgccaggtatcaggcaaggatatgggctcactgagactacatcagctattctgattacacccgagggggatgataaaccgggcgcggtcggtaaagttgttccattttttgaagcgaaggttgtggatctggataccgggaaaacgctgggcgttaatcaaagaggcgaactgtgtgtgagaggtcctatgattatgtccggttatgtaaacaatccggaagcgaccaacgccttgattgacaaggatggatggctacattctggagacatagcttactgggacgaagacgaacacttcttcatcgttgaccgcctgaagtctctgattaagtacaaaggctatcaggtggctcccgctgaattggaatccatcttgctccaacaccccaacatcttcgacgcaggtgtcgcaggtcttcccgacgatgacgccggtgaacttcccgccgccgttgttgttttggagcacggaaagacgatgacggaaaaagagatcgtggattacgtcgccagtcaagtaacaaccgcgaaaaagttgcgcggaggagttgtgtttgtggacgaagtaccgaaaggtcttaccggaaaactcgacgcaagaaaaatcagagagatcctcataaaggccaagaagggcggaaagatcgccgtgtcaggtggatcctagataacctttaccttcattccctgtaaattggtaccctgcaaagctttcgttcgtatcatcggtttcgacaacgttcgtcaagttcaatgcatcagtttcattgcgcacacaccagaatcctactgagtttgagtattatggcattgggaaaactgtttttcttgtaccatttgttgtgcttgtaatttactgtgttttttattcggttttcgctatcgaactgtgaaatggaaatggatggagaagagttaatgaatgatatggtccttttgttcattctcaaattaatattatttgttttttctcttatttgttgtgtgttgaatttgaaattataagagatatgcaaacattttgttttgagtaaaaatgtgtcaaatcgtggcctctaatgaccgaagttaatatgaggagtaaaacacttgtagttgtaccattatgcttattcactaggcaacaaatatattttcagacctagaaaagctgcaaatgttactgaatacaagtatgtcctcttgtgttttagacatttatgaactttcctttatgtaattttccagaatccttgtcagattctaatcattgctttataattatagttatactcatggatttgtagttgagtatgaaaatattttttaatgcattttatgacttgccaattgattgacaacatgcatcaatcgactagtcgacgagtcagtaataaacggcgtcaaagtggttgcagccggcacacacgagtcgtgtttatcaactcaaagcacaaatacttttcctcaacctaaaaataaggcaattagccaaaaacaactttgcgtgtaaacaacgctcaatacacgtgtcattttattattagctattgcttcaccgccttagctttctcgtgacctagtcgtcctcgtcttttcttcttcttcttctataaaacaatacccaaagagctcttcttcttcacaattcagatttcaatttctcaaaatcttaaaaactttctctcaattctctctaccgtgatcaaggtaaatttctgtgttccttattctctcaaaatcttcgattttgttttcgttcgatcccaatttcgtatatgttctttggtttagattctgttaatcttagatcgaagacgattttctgggtttgatcgttagatatcatcttaattctcgattagggtttcatagatatcatccgatttgttcaaataatttgagttttgtcgaataattactcttcgatttgtgatttctatctagatctggtgttagtttctagtttgtgcgatcgaatttgtagattaatctgagtttttctgattaacaccacaccaatctggtaccagaaaaggggagaagcaaaaccatgggtaaaaagcctgaactcaccgcgacgtctgtcgagaagtttctgatcgaaaagttcgacagcgtctccgacctgatgcagctctcggagggcgaagaatctcgtgctttcagcttcgatgtaggagggcgtggatatgtcctgcgggtaaatagctgcgccgatggtttctacaaagatcgttatgtttatcggcactttgcatcggccgcgctcccgattccggaagtgcttgacattggggcattcagcgagagcctgacctattgcatctcccgccgtgcacagggtgtcacgttgcaagacctgcctgaaaccgaactgcccgctgttctgcaaccggtcgcggaggcgatggatgccatcgctgcggccgatcttagccagacgagcgggttcggcccattcggaccgcaaggaatcggtcaatacactacatggcgtgatttcatatgcgcgattgctgatccccatgtgtatcactggcaaactgtgatggacgacaccgtcagtgcgtccgtcgcgcaggctctcgatgagctgatgctttgggccgaggactgccccgaagtccggcacctcgtgcacgcggatttcggctccaacaatgtcctgacggacaatggccgcataacagcggtcattgactggagcgaggcgatgttcggggattcccaatacgaggtcgccaacatcttcttctggaggccgtggttggcttgtatggagcagcagacgcgctacttcgagcggaggcatccggagcttgcaggatcgccgcggctccgggcgtatatgctccgcattggtcttgaccaactctatcagagcttggttgacggcaatttcgatgatgcagcttgggcgcagggtcgatgcgacgcaatcgtccgatccggagccgggactgtcgggcgtacacaaatcgcccgcagaagcgcggccgtctggaccgatggctgtgtagaagtactcgccgatagtggaaaccgacgccccagcactcgtccgagggcaaaggaatagatgcatcctgctttaatgagatatgcgagacgcctatgatcgcatgatatttgctttcaattctgttgtgcacgttgtaaaaaacctgagcatgtgtagctcagatccttaccgccggtttcggttcattctaatgaatatatcacccgttactatcgtatttttatgaataatattctccgttcaatttactgattgtaccctactacttatatgtacaatattaaaatgaaaacaatatattgtgctgaataggtttatagcgacatctatgatagagcgccacaataacaaacaattgcgttttattattacaaatccaattttaaaaaaagcggcagaaccggtcaaacctaaaagactgattacataaatcttattcaaatttcaaaagtgccccaggggctagtatctacgacacaccgagcggcgaactaataacgctcactgaagggaactccggttccccgccggcgcgcatgggtgagattccttgaagttgagtattggccgtccgctctaccgaaagttacgggcaccattcaacccggtccagcacggcggccgggtaaccgacttgctgccccgagaattatgcagcatttttttggtgtatgtgggccccaaatgaagtgcaggtcaaaccttgacagtgacgacaaatcgttgggcgggtccagggcgaattttgcgacaacatgtcgaggctcagcaggaccggcatgcaagctagcttactagtgatattctatagtgtcacctaaatgtattctagaccaagcatgcacagctggcgttctcagccagatccaacgttacaccacaatatatcctgccaagatctaattccggggatcggaaatccagaagcccgagaggttgccgcctttcgggctttttctttttcaaaaaaaaaaatttataaaacgatctgttgcggccggccgccgggttgtgggcaaaggcgctcgacggtgggcaaccgcttgcggttgtccacgggcggagccggtgcgcgtagcgcattgtccacaagccaagggcgaccaataattgatatatatattcataattgaaaagctaattgaacatactacttgctgtaactacttgccggagcgaggggtgtttgcaagctgttgatctgaaagggctattagcgttctcacgtgcctttttgattagcgatttcacgtgaccttattagcgatttcacgtactccgattagcgatttcacgtaccctgattagcgatttcacgtggatagtttttggagcgggccggaaagccccgtgaatcaaggctttgcggggcattagcggtttcacgtggataactaccctctatccacaggcttccggggataaaaaagcccgctcgacggcgggctgttggatggggatcgcctgaatcgccccatcatccagccagaaagtgagggagccacggttgatgagagctttgttgtaggtggaccagttggtgattttgaacttttgctttgccacggaacggtctgcgttgtcgggaagatgcgtgatctgatccttcaactcagcaaaagttcgatttattcaacaaagccacgttgtgtctcaaaatctctgatgttacattgcacaagataaaaatatatcatcatgaacaataaaactgtctgcttacataaacagtaatacaaggggtgttatgagggaagcggtgatcgccgaagtatcgactcaactatcagaggtagttggcgtcatcgagcgccatctcgaaccgacgttgctggccgtacatttgtacggctccgcagtggatggcggcctgaagccacacagtgatattgatttgctggttacggtgaccgtaaggcttgatgaaacaacgcggcgagctttgatcaacgaccttttggaaacttcggcttcccctggagagagcgagattctccgcgctgtagaagtcaccattgttgtgcacgacgacatcattccgtggcgttatccagctaagcgcgaactgcaatttggagaatggcagcgcaatgacattcttgcaggtatcttcgagccagccacgatcgacattgatctggctatcttgctgacaaaagcaagagaacatagcgttgccttggtaggtccagcggcggaggaactctttgatccggttcctgaacaggatctatttgaggcgctaaatgaaaccttaacgctatggaactcgccgcccgactgggctggcgatgagcgaaatgtagtgcttacgttgtcccgcatttggtacagcgcagtaaccggcaaaatcgcgccgaaggatgtcgctgccgactgggcaatggagcgcctgccggcccagtatcagcccgtcatacttgaagctaggcaggcttatcttggacaagaagatcgcttggcctcgcgcgcagatcagttggaagaatttgttcactacgtgaaaggcgagatcaccaaggtagtcggcaaataatcactagaccaatgttacacatatatactttagattgatttaaaacttcatttttaatttaaaaggatctaggtgaagatcctttttgataatctcatgaccaaaatcccttaacgtgagttttcgttccactgagcgtcagaccccgtagaaaagatcaaaggatcttcttgagatcctttttttctgcgcgtaatctgctgcttgcaaacaaaaaaaccaccgctaccagcggtggtttgtttgccggatcaagagctaccaactcttcttccgaaggtaactggcttcagcagagcgcagataccaaatactgttcttctagtgtagccgtagttaggccaccacttcaagaactctgtagcaccgcctacatacctcgctctgctaatcctgttaccagtggctgctgccagtggcgataagtcgtgtcttaccgggttggactcaagacgatagttaccggataaggcgcagcggtcgggctgaacggggggttcgtgcacacagcccagcttggagcgaacgacctacaccgaactgagatacctacagcgtgagctatgagaaagcgccacgcttcccgaagggagaaaggcggacaggtatccggtaagcggcagggtcggaacaggagagcgcacgagggagcttccagggggaaacgcctggtatctttatagtcctgtcgggtttcgccacctctgacttgagcgtcgatttttgtgatgctcgtcaggggggcggagcctatggaaaaacgccagcaacgcggcctttttacggttcctggccttttgctggccttttgctcacatgagatctcaaacaaacacatacagcgacttagtttacccgccaatatatcctgtcaaggctcgaactaggctcggacgaagtaagcggccgcaaccttaattaaacacggcgcgccaacagcgatcgcaccaggtacc

SEQ ID NO: 279 - DNA, 8180 bp, synthetic construct
  misc_feature 1..8180: note = pAGS-0042 MAS promoter
  source 1..8180: mol_type = other DNA
acctgcaatctcacgcaccaggcgctggaagggcaacttgcggatgagaaggtccgtggacttctggtaacgacggatctcacgcagagcgacggttccagggcgataacggtggggcttcttgactcctccggtagccggagcggacttacgggcagccttggtggcaagctgcttgcgcggcgctttgcctccggtggatttacgggcggtttgcttggttcgggccattttgacggttttttttacaagagaagagttcttgaaatttgtgaggttaaagtgtgtggcttccgccgtagtcaaggagcgtgcggttgccgatcgcaccggtacgttctgtagaaatgaacacagtgtgttgaattgaaagtatggcgcaggtatggtgtgtgataagtagcagccgcgccgagacaaacaaactttggtttctacgacaatctctgtagacaagtactagaaacccgtttgaacgagcataaatctgcaccggcaggccaccagacatcgtttcaacgtaatattctacgtaaccattttatcccaggaaacctacggcctgtgaaccactgaaaggaagcactcacaattcgctctcggcaacaaccgacaatagtcttactcacagtcaataccgaaaacaaacaacagaacagtattcagtcgactggtaccaacaggctatggaagacgccaaaaacataaagaaaggcccggcgccattctatccgctggaagatggaaccgctggagagcaactgcataaggctatgaagagatacgccctggttcctggaacaattgcttttacagatgcacatatcgaggtggacatcacttacgctgagtacttcgaaatgtccgttcggttggcagaagctatgaaacgatatgggctgaatacaaatcacagaatcgtcgtatgcagtgaaaactctcttcaattctttatgccggtgttgggcgcgttatttatcggagttgcagttgcgcccgcgaacgacatttataatgaacgtgaattgctcaacagtatgggcatttcgcagcctaccgtggtgttcgtttccaaaaaggggttgcaaaaaattttgaacgtgcaaaaaaagctcccaatcatccaaaaaattattatcatggattctaaaacggattaccagggatttcagtcgatgtacacgttcgtcacatctcatctacctcccggttttaatgaatacgattttgtgccagagtccttcgatagggacaagacaattgcactgatcatgaactcctctggatctactggtctgcctaaaggtgtcgctctgcctcatagaactgcctgcgtgagattctcgcatgccagagatcctatttttggcaatcaaatcattccggatactgcgattttaagtgttgttccattccatcacggttttggaatgtttactacactcggatatttgatatgtggatttcgagtcgtcttaatgtatagatttgaagaagagctgtttctgaggagccttcaggattacaagattcaaagtgcgctgctggtgccaaccctattctccttcttcgccaaaagcactctgattgacaaatacgatttatctaatttacacgaaattgcttctggtggcgctcccctctctaaggaagtcggggaagcggttgccaagaggttccatctgccaggtatcaggcaaggatatgggctcactgagactacatcagctattctgattacacccgagggggatgataaaccgggcgcggtcggtaaagttgttccattttttgaagcgaaggttgtggatctggataccgggaaaacgctgggcgttaatcaaagaggcgaactgtgtgtgagaggtcctatgattatgtccggttatgtaaacaatccggaagcgaccaacgccttgattgacaaggatggatggctacattctggagacatagcttactgggacgaagacgaacacttcttcatcgttgaccgcctgaagtctctgattaagtacaaaggctatcaggtggctcccgctgaattggaatccatcttgctccaacaccccaacatcttcgacgcaggtgtcgcaggtcttcccgacgatgacgccggtgaacttcccgccgccgttgttgttttggagcacggaaagacgatgacggaaaaagagatcgtggattacgtcgccagtcaagtaacaaccgcgaaaaagttgcgcggaggagttgtgtttgtggacgaagtaccgaaaggtcttaccggaaaactcgacgcaagaaaaatcagagagatcctcataaaggccaagaagggcggaaagatcgccgtgtcaggtggatcctagataacctttaccttcattccctgtaaattggtaccctgcaaagctttcgttcgtatcatcggtttcgacaacgttcgtcaagttcaatgcatcagtttcattgcgcacacaccagaatcctactgagtttgagtattatggcattgggaaaactgtttttcttgtaccatttgttgtgcttgtaatttactgtgttttttattcggttttcgctatcgaactgtgaaatggaaatggatggagaagagttaatgaatgatatggtccttttgttcattctcaaattaatattatttgttttttctcttatttgttgtgtgttgaatttgaaattataagagatatgcaaacattttgttttgagtaaaaatgtgtcaaatcgtggcctctaatgaccgaagttaatatgaggagtaaaacacttgtagttgtaccattatgcttattcactaggcaacaaatatattttcagacctagaaaagctgcaaatgttactgaatacaagtatgtcctcttgtgttttagacatttatgaactttcctttatgtaattttccagaatccttgtcagattctaatcattgctttataattatagttatactcatggatttgtagttgagtatgaaaatattttttaatgcattttatgacttgccaattgattgacaacatgcatcaatcgactagtcgacgagtcagtaataaacggcgtcaaagtggttgcagccggcacacacgagtcgtgtttatcaactcaaagcacaaatacttttcctcaacctaaaaataaggcaattagccaaaaacaactttgcgtgtaaacaacgctcaatacacgtgtcattttattattagctattgcttcaccgccttagctttctcgtgacctagtcgtcctcgtcttttcttcttcttcttctataaaacaatacccaaagagctcttcttcttcacaattcagatttcaatttctcaaaatcttaaaaactttctctcaattctctctaccgtgatcaaggtaaatttctgtgttccttattctctcaaaatcttcgattttgttttcgttcgatcccaatttcgtatatgttctttggtttagattctgttaatcttagatcgaagacgattttctgggtttgatcgttagatatcatcttaattctcgattagggtttcatagatatcatccgatttgttcaaataatttgagttttgtcgaataattactcttcgatttgtgatttctatctagatctggtgttagtttctagtttgtgcgatcgaatttgtagattaatctgagtttttctgattaacaccacaccaatctggtaccagaaaaggggagaagcaaaaccatgggtaaaaagcctgaactcaccgcgacgtctgtcgagaagtttctgatcgaaaagttcgacagcgtctccgacctgatgcagctctcggagggcgaagaatctcgtgctttcagcttcgatgtaggagggcgtggatatgtcctgcgggtaaatagctgcgccgatggtttctacaaagatcgttatgtttatcggcactttgcatcggccgcgctcccgattccggaagtgcttgacattggggcattcagcgagagcctgacctattgcatctcccgccgtgcacagggtgtcacgttgcaagacctgcctgaaaccgaactgcccgctgttctgcaaccggtcgcggaggcgatggatgccatcgctgcggccgatcttagccagacgagcgggttcggcccattcggaccgcaaggaatcggtcaatacactacatggcgtgatttcatatgcgcgattgctgatccccatgtgtatcactggcaaactgtgatggacgacaccgtcagtgcgtccgtcgcgcaggctctcgatgagctgatgctttgggccgaggactgccccgaagtccggcacctcgtgcacgcggatttcggctccaacaatgtcctgacggacaatggccgcataacagcggtcattgactggagcgaggcgatgttcggggattcccaatacgaggtcgccaacatcttcttctggaggccgtggttggcttgtatggagcagcagacgcgctacttcgagcggaggcatccggagcttgcaggatcgccgcggctccgggcgtatatgctccgcattggtcttgaccaactctatcagagcttggttgacggcaatttcgatgatgcagcttgggcgcagggtcgatgcgacgcaatcgtccgatccggagccgggactgtcgggcgtacacaaatcgcccgcagaagcgcggccgtctggaccgatggctgtgtagaagtactcgccgatagtggaaaccgacgccccagcactcgtccgagggcaaaggaatagatgcatcctgctttaatgagatatgcgagacgcctatgatcgcatgatatttgctttcaattctgttgtgcacgttgtaaaaaacctgagcatgtgtagctcagatccttaccgccggtttcggttcattctaatgaatatatcacccgttactatcgtatttttatgaataatattctccgttcaatttactgattgtaccctactacttatatgtacaatattaaaatgaaaacaatatattgtgctgaataggtttatagcgacatctatgatagagcgccacaataacaaacaattgcgttttattattacaaatccaattttaaaaaaagcggcagaaccggtcaaacctaaaagactgattacataaatcttattcaaatttcaaaagtgccccaggggctagtatctacgacacaccgagcggcgaactaataacgctcactgaagggaactccggttccccgccggcgcgcatgggtgagattccttgaagttgagtattggccgtccgctctaccgaaagttacgggcaccattcaacccggtccagcacggcggccgggtaaccgacttgctgccccgagaattatgcagcatttttttggtgtatgtgggccccaaatgaagtgcaggtcaaaccttgacagtgacgacaaatcgttgggcgggtccagggcgaattttgcgacaacatgtcgaggctcagcaggaccggcatgcaagctagcttactagtgatattctatagtgtcacctaaatgtattctagaccaagcatgcacagctggcgttctcagccagatccaacgttacaccacaatatatcctgccaagatctaattccggggatcggaaatccagaagcccgagaggttgccgcctttcgggctttttctttttcaaaaaaaaaaatttataaaacgatctgttgcggccggccgccgggttgtgggcaaaggcgctcgacggtgggcaaccgcttgcggttgtccacgggcggagccggtgcgcgtagcgcattgtccacaagccaagggcgaccaataattgatatatatattcataattgaaaagctaattgaacatactacttgctgtaactacttgccggagcgaggggtgtttgcaagctgttgatctgaaagggctattagcgttctcacgtgcctttttgattagcgatttcacgtgaccttattagcgatttcacgtactccgattagcgatttcacgtaccctgattagcgatttcacgtggatagtttttggagcgggccggaaagccccgtgaatcaaggctttgcggggcattagcggtttcacgtggataactaccctctatccacaggcttccggggataaaaaagcccgctcgacggcgggctgttggatggggatcgcctgaatcgccccatcatccagccagaaagtgagggagccacggttgatgagagctttgttgtaggtggaccagttggtgattttgaacttttgctttgccacggaacggtctgcgttgtcgggaagatgcgtgatctgatccttcaactcagcaaaagttcgatttattcaacaaagccacgttgtgtctcaaaatctctgatgttacattgcacaagataaaaatatatcatcatgaacaataaaactgtctgcttacataaacagtaatacaaggggtgttatgagggaagcggtgatcgccgaagtatcgactcaactatcagaggtagttggcgtcatcgagcgccatctcgaaccgacgttgctggccgtacatttgtacggctccgcagtggatggcggcctgaagccacacagtgatattgatttgctggttacggtgaccgtaaggcttgatgaaacaacgcggcgagctttgatcaacgaccttttggaaacttcggcttcccctggagagagcgagattctccgcgctgtagaagtcaccattgttgtgcacgacgacatcattccgtggcgttatccagctaagcgcgaactgcaatttggagaatggcagcgcaatgacattcttgcaggtatcttcgagccagccacgatcgacattgatctggctatcttgctgacaaaagcaagagaacatagcgttgccttggtaggtccagcggcggaggaactctttgatccggttcctgaacaggatctatttgaggcgctaaatgaaaccttaacgctatggaactcgccgcccgactgggctggcgatgagcgaaatgtagtgcttacgttgtcccgcatttggtacagcgcagtaaccggcaaaatcgcgccgaaggatgtcgctgccgactgggcaatggagcgcctgccggcccagtatcagcccgtcatacttgaagctaggcaggcttatcttggacaagaagatcgcttggcctcgcgcgcagatcagttggaagaatttgttcactacgtgaaaggcgagatcaccaaggtagtcggcaaataatcactagaccaatgttacacatatatactttagattgatttaaaacttcatttttaatttaaaaggatctaggtgaagatcctttttgataatctcatgaccaaaatcccttaacgtgagttttcgttccactgagcgtcagaccccgtagaaaagatcaaaggatcttcttgagatcctttttttctgcgcgtaatctgctgcttgcaaacaaaaaaaccaccgctaccagcggtggtttgtttgccggatcaagagctaccaactcttcttccgaaggtaactggcttcagcagagcgcagataccaaatactgttcttctagtgtagccgtagttaggccaccacttcaagaactctgtagcaccgcctacatacctcgctctgctaatcctgttaccagtggctgctgccagtggcgataagtcgtgtcttaccgggttggactcaagacgatagttaccggataaggcgcagcggtcgggctgaacggggggttcgtgcacacagcccagcttggagcgaacgacctacaccgaactgagatacctacagcgtgagctatgagaaagcgccacgcttcccgaagggagaaaggcggacaggtatccggtaagcggcagggtcggaacaggagagcgcacgagggagcttccagggggaaacgcctggtatctttatagtcctgtcgggtttcgccacctctgacttgagcgtcgatttttgtgatgctcgtcaggggggcggagcctatggaaaaacgccagcaacgcggcctttttacggttcctggccttttgctggccttttgctcacatgagatctcaaacaaacacatacagcgacttagtttacccgccaatatatcctgtcaaggctcgaactaggctcggacgaagtaagcggccgcaaccttaattaaacacggcgcgccaacagcgatcgcaccaggtacc

SEQ ID NO: 280 - DNA, 7670 bp, synthetic construct
  misc_feature 1..7670: note = pAGS-0043 PAR promoter
  source 1..7670: mol_type = other DNA
acctgctgcaggacgcaatggaggattatcaccgcaaaaatgaacttcgaaaaaaactttcgagcgaccatggaaaaggaggatcagattcagattacaacagtggattgctctggtagcaaatatcttctgctagattggctcaacagtattcagtcgactggtaccaacaggctatggaagacgccaaaaacataaagaaaggcccggcgccattctatccgctggaagatggaaccgctggagagcaactgcataaggctatgaagagatacgccctggttcctggaacaattgcttttacagatgcacatatcgaggtggacatcacttacgctgagtacttcgaaatgtccgttcggttggcagaagctatgaaacgatatgggctgaatacaaatcacagaatcgtcgtatgcagtgaaaactctcttcaattctttatgccggtgttgggcgcgttatttatcggagttgcagttgcgcccgcgaacgacatttataatgaacgtgaattgctcaacagtatgggcatttcgcagcctaccgtggtgttcgtttccaaaaaggggttgcaaaaaattttgaacgtgcaaaaaaagctcccaatcatccaaaaaattattatcatggattctaaaacggattaccagggatttcagtcgatgtacacgttcgtcacatctcatctacctcccggttttaatgaatacgattttgtgccagagtccttcgatagggacaagacaattgcactgatcatgaactcctctggatctactggtctgcctaaaggtgtcgctctgcctcatagaactgcctgcgtgagattctcgcatgccagagatcctatttttggcaatcaaatcattccggatactgcgattttaagtgttgttccattccatcacggttttggaatgtttactacactcggatatttgatatgtggatttcgagtcgtcttaatgtatagatttgaagaagagctgtttctgaggagccttcaggattacaagattcaaagtgcgctgctggtgccaaccctattctccttcttcgccaaaagcactctgattgacaaatacgatttatctaatttacacgaaattgcttctggtggcgctcccctctctaaggaagtcggggaagcggttgccaagaggttccatctgccaggtatcaggcaaggatatgggctcactgagactacatcagctattctgattacacccgagggggatgataaaccgggcgcggtcggtaaagttgttccattttttgaagcgaaggttgtggatctggataccgggaaaacgctgggcgttaatcaaagaggcgaactgtgtgtgagaggtcctatgattatgtccggttatgtaaacaatccggaagcgaccaacgccttgattgacaaggatggatggctacattctggagacatagcttactgggacgaagacgaacacttcttcatcgttgaccgcctgaagtctctgattaagtacaaaggctatcaggtggctcccgctgaattggaatccatcttgctccaacaccccaacatcttcgacgcaggtgtcgcaggtcttcccgacgatgacgccggtgaacttcccgccgccgttgttgttttggagcacggaaagacgatgacggaaaaagagatcgtggattacgtcgccagtcaagtaacaaccgcgaaaaagttgcgcggaggagttgtgtttgtggacgaagtaccgaaaggtcttaccggaaaactcgacgcaagaaaaatcagagagatcctcataaaggccaagaagggcggaaagatcgccgtgtcaggtggatcctagataacctttaccttcattccctgtaaattggtaccctgcaaagctttcgttcgtatcatcggtttcgacaacgttcgtcaagttcaatgcatcagtttcattgcgcacacaccagaatcctactgagtttgagtattatggcattgggaaaactgtttttcttgtaccatttgttgtgcttgtaatttactgtgttttttattcggttttcgctatcgaactgtgaaatggaaatggatggagaagagttaatgaatgatatggtccttttgttcattctcaaattaatattatttgttttttctcttatttgttgtgtgttgaatttgaaattataagagatatgcaaacattttgttttgagtaaaaatgtgtcaaatcgtggcctctaatgaccgaagttaatatgaggagtaaaacacttgtagttgtaccattatgcttattcactaggcaacaaatatattttcagacctagaaaagctgcaaatgttactgaatacaagtatgtcctcttgtgttttagacatttatgaactttcctttatgtaattttccagaatccttgtcagattctaatcattgctttataattatagttatactcatggatttgtagttgagtatgaaaatattttttaatgcattttatgacttgccaattgattgacaacatgcatcaatcgactagtcgacgagtcagtaataaacggcgtcaaagtggttgcagccggcacacacgagtcgtgtttatcaactcaaagcacaaatacttttcctcaacctaaaaataaggcaattagccaaaaacaactttgcgtgtaaacaacgctcaatacacgtgtcattttattattagctattgcttcaccgccttagctttctcgtgacctagtcgtcctcgtcttttcttcttcttcttctataaaacaatacccaaagagctcttcttcttcacaattcagatttcaatttctcaaaatcttaaaaactttctctcaattctctctaccgtgatcaaggtaaatttctgtgttccttattctctcaaaatcttcgattttgttttcgttcgatcccaatttcgtatatgttctttggtttagattctgttaatcttagatcgaagacgattttctgggtttgatcgttagatatcatcttaattctcgattagggtttcatagatatcatccgatttgttcaaataatttgagttttgtcgaataattactcttcgatttgtgatttctatctagatctggtgttagtttctagtttgtgcgatcgaatttgtagattaatctgagtttttctgattaacaccacaccaatctggtaccagaaaaggggagaagcaaaaccatgggtaaaaagcctgaactcaccgcgacgtctgtcgagaagtttctgatcgaaaagttcgacagcgtctccgacctgatgcagctctcggagggcgaagaatctcgtgctttcagcttcgatgtaggagggcgtggatatgtcctgcgggtaaatagctgcgccgatggtttctacaaagatcgttatgtttatcggcactttgcatcggccgcgctcccgattccggaagtgcttgacattggggcattcagcgagagcctgacctattgcatctcccgccgtgcacagggtgtcacgttgcaagacctgcctgaaaccgaactgcccgctgttctgcaaccggtcgcggaggcgatggatgccatcgctgcggccgatcttagccagacgagcgggttcggcccattcggaccgcaaggaatcggtcaatacactacatggcgtgatttcatatgcgcgattgctgatccccatgtgtatcactggcaaactgtgatggacgacaccgtcagtgcgtccgtcgcgcaggctctcgatgagctgatgctttgggccgaggactgccccgaagtccggcacctcgtgcacgcggatttcggctccaacaatgtcctgacggacaatggccgcataacagcggtcattgactggagcgaggcgatgttcggggattcccaatacgaggtcgccaacatcttcttctggaggccgtggttggcttgtatggagcagcagacgcgctacttcgagcggaggcatccggagcttgcaggatcgccgcggctccgggcgtatatgctccgcattggtcttgaccaactctatcagagcttggttgacggcaatttcgatgatgcagcttgggcgcagggtcgatgcgacgcaatcgtccgatccggagccgggactgtcgggcgtacacaaatcgcccgcagaagcgcggccgtctggaccgatggctgtgtagaagtactcgccgatagtggaaaccgacgccccagcactcgtccgagggcaaaggaatagatgcatcctgctttaatgagatatgcgagacgcctatgatcgcatgatatttgctttcaattctgttgtgcacgttgtaaaaaacctgagcatgtgtagctcagatccttaccgccggtttcggttcattctaatgaatatatcacccgttactatcgtatttttatgaataatattctccgttcaatttactgattgtaccctactacttatatgtacaatattaaaatgaaaacaatatattgtgctgaataggtttatagcgacatctatgatagagcgccacaataacaaacaattgcgttttattattacaaatccaattttaaaaaaagcggcagaaccggtcaaacctaaaagactgattacataaatcttattcaaatttcaaaagtgccccaggggctagtatctacgacacaccgagcggcgaactaataacgctcactgaagggaactccggttccccgccggcgcgcatgggtgagattccttgaagttgagtattggccgtccgctctaccgaaagttacgggcaccattcaacccggtccagcacggcggccgggtaaccgacttgctgccccgagaattatgcagcatttttttggtgtatgtgggccccaaatgaagtgcaggtcaaaccttgacagtgacgacaaatcgttgggcgggtccagggcgaattttgcgacaacatgtcgaggctcagcaggaccggcatgcaagctagcttactagtgatattctatagtgtcacctaaatgtattctagaccaagcatgcacagctggcgttctcagccagatccaacgttacaccacaatatatcctgccaagatctaattccggggatcggaaatccagaagcccgagaggttgccgcctttcgggctttttctttttcaaaaaaaaaaatttataaaacgatctgttgcggccggccgccgggttgtgggcaaaggcgctcgacggtgggcaaccgcttgcggttgtccacgggcggagccggtgcgcgtagcgcattgtccacaagccaagggcgaccaataattgatatatatattcataattgaaaagctaattgaacatactacttgctgtaactacttgccggagcgaggggtgtttgcaagctgttgatctgaaagggctattagcgttctcacgtgcctttttgattagcgatttcacgtgaccttattagcgatttcacgtactccgattagcgatttcacgtaccctgattagcgatttcacgtggatagtttttggagcgggccggaaagccccgtgaatcaaggctttgcggggcattagcggtttcacgtggataactaccctctatccacaggcttccggggataaaaaagcccgctcgacggcgggctgttggatggggatcgcctgaatcgccccatcatccagccagaaagtgagggagccacggttgatgagagctttgttgtaggtggaccagttggtgattttgaacttttgctttgccacggaacggtctgcgttgtcgggaagatgcgtgatctgatccttcaactcagcaaaagttcgatttattcaacaaagccacgttgtgtctcaaaatctctgatgttacattgcacaagataaaaatatatcatcatgaacaataaaactgtctgcttacataaacagtaatacaaggggtgttatgagggaagcggtgatcgccgaagtatcgactcaactatcagaggtagttggcgtcatcgagcgccatctcgaaccgacgttgctggccgtacatttgtacggctccgcagtggatggcggcctgaagccacacagtgatattgatttgctggttacggtgaccgtaaggcttgatgaaacaacgcggcgagctttgatcaacgaccttttggaaacttcggcttcccctggagagagcgagattctccgcgctgtagaagtcaccattgttgtgcacgacgacatcattccgtggcgttatccagctaagcgcgaactgcaatttggagaatggcagcgcaatgacattcttgcaggtatcttcgagccagccacgatcgacattgatctggctatcttgctgacaaaagcaagagaacatagcgttgccttggtaggtccagcggcggaggaactctttgatccggttcctgaacaggatctatttgaggcgctaaatgaaaccttaacgctatggaactcgccgcccgactgggctggcgatgagcgaaatgtagtgcttacgttgtcccgcatttggtacagcgcagtaaccggcaaaatcgcgccgaaggatgtcgctgccgactgggcaatggagcgcctgccggcccagtatcagcccgtcatacttgaagctaggcaggcttatcttggacaagaagatcgcttggcctcgcgcgcagatcagttggaagaatttgttcactacgtgaaaggcgagatcaccaaggtagtcggcaaataatcactagaccaatgttacacatatatactttagattgatttaaaacttcatttttaatttaaaaggatctaggtgaagatcctttttgataatctcatgaccaaaatcccttaacgtgagttttcgttccactgagcgtcagaccccgtagaaaagatcaaaggatcttcttgagatcctttttttctgcgcgtaatctgctgcttgcaaacaaaaaaaccaccgctaccagcggtggtttgtttgccggatcaagagctaccaactcttcttccgaaggtaactggcttcagcagagcgcagataccaaatactgttcttctagtgtagccgtagttaggccaccacttcaagaactctgtagcaccgcctacatacctcgctctgctaatcctgttaccagtggctgctgccagtggcgataagtcgtgtcttaccgggttggactcaagacgatagttaccggataaggcgcagcggtcgggctgaacggggggttcgtgcacacagcccagcttggagcgaacgacctacaccgaactgagatacctacagcgtgagctatgagaaagcgccacgcttcccgaagggagaaaggcggacaggtatccggtaagcggcagggtcggaacaggagagcgcacgagggagcttccagggggaaacgcctggtatctttatagtcctgtcgggtttcgccacctctgacttgagcgtcgatttttgtgatgctcgtcaggggggcggagcctatggaaaaacgccagcaacgcggcctttttacggttcctggccttttgctggccttttgctcacatgagatctcaaacaaacacatacagcgacttagtttacccgccaatatatcctgtcaaggctcgaactaggctcggacgaagtaagcggccgcaaccttaattaaacacggcgcgccaacagcgatcgcaccaggtacc

SEQ ID NO: 281 - DNA, 7793 bp, synthetic construct
  misc_feature 1..7793: note = pAGS-0044 Cv PAS D promoter
  source 1..7793: mol_type = other DNA
acctactacgttagagcgctaacgagaatacttcatataccgtattttttacgataataataatgtaatgtgaaattgctatccaaaaggcacctaattttgtccaccgttcaaaggaaaggacaaggaagtagtagcgtgtaggtttggtgctgtacaaaataagcaagacacgtgttgccttattataggataatccataaggcaatttcgtcttaagtcggccattgcacctttaaaaggagcctctttgttcccaaaatcttcaacagtattcagtcgactggtaccaacaggctatggaagacgccaaaaacataaagaaaggcccggcgccattctatccgctggaagatggaaccgctggagagcaactgcataaggctatgaagagatacgccctggttcctggaacaattgcttttacagatgcacatatcgaggtggacatcacttacgctgagtacttcgaaatgtccgttcggttggcagaagctatgaaacgatatgggctgaatacaaatcacagaatcgtcgtatgcagtgaaaactctcttcaattctttatgccggtgttgggcgcgttatttatcggagttgcagttgcgcccgcgaacgacatttataatgaacgtgaattgctcaacagtatgggcatttcgcagcctaccgtggtgttcgtttccaaaaaggggttgcaaaaaattttgaacgtgcaaaaaaagctcccaatcatccaaaaaattattatcatggattctaaaacggattaccagggatttcagtcgatgtacacgttcgtcacatctcatctacctcccggttttaatgaatacgattttgtgccagagtccttcgatagggacaagacaattgcactgatcatgaactcctctggatctactggtctgcctaaaggtgtcgctctgcctcatagaactgcctgcgtgagattctcgcatgccagagatcctatttttggcaatcaaatcattccggatactgcgattttaagtgttgttccattccatcacggttttggaatgtttactacactcggatatttgatatgtggatttcgagtcgtcttaatgtatagatttgaagaagagctgtttctgaggagccttcaggattacaagattcaaagtgcgctgctggtgccaaccctattctccttcttcgccaaaagcactctgattgacaaatacgatttatctaatttacacgaaattgcttctggtggcgctcccctctctaaggaagtcggggaagcggttgccaagaggttccatctgccaggtatcaggcaaggatatgggctcactgagactacatcagctattctgattacacccgagggggatgataaaccgggcgcggtcggtaaagttgttccattttttgaagcgaaggttgtggatctggataccgggaaaacgctgggcgttaatcaaagaggcgaactgtgtgtgagaggtcctatgattatgtccggttatgtaaacaatccggaagcgaccaacgccttgattgacaaggatggatggctacattctggagacatagcttactgggacgaagacgaacacttcttcatcgttgaccgcctgaagtctctgattaagtacaaaggctatcaggtggctcccgctgaattggaatccatcttgctccaacaccccaacatcttcgacgcaggtgtcgcaggtcttcccgacgatgacgccggtgaacttcccgccgccgttgttgttttggagcacggaaagacgatgacggaaaaagagatcgtggattacgtcgccagtcaagtaacaaccgcgaaaaagttgcgcggaggagttgtgtttgtggacgaagtaccgaaaggtcttaccggaaaactcgacgcaagaaaaatcagagagatcctcataaaggccaagaagggcggaaagatcgccgtgtcaggtggatcctagataacctttaccttcattccctgtaaattggtaccctgcaaagctttcgttcgtatcatcggtttcgacaacgttcgtcaagttcaatgcatcagtttcattgcgcacacaccagaatcctactgagtttgagtattatggcattgggaaaactgtttttcttgtaccatttgttgtgcttgtaatttactgtgttttttattcggttttcgctatcgaactgtgaaatggaaatggatggagaagagttaatgaatgatatggtccttttgttcattctcaaattaatattatttgttttttctcttatttgttgtgtgttgaatttgaaattataagagatatgcaaacattttgttttgagtaaaaatgtgtcaaatcgtggcctctaatgaccgaagttaatatgaggagtaaaacacttgtagttgtaccattatgcttattcactaggcaacaaatatattttcagacctagaaaagctgcaaatgttactgaatacaagtatgtcctcttgtgttttagacatttatgaactttcctttatgtaattttccagaatccttgtcagattctaatcattgctttataattatagttatactcatggatttgtagttgagtatgaaaatattttttaatgcattttatgacttgccaattgattgacaacatgcatcaatcgactagtcgacgagtcagtaataaacggcgtcaaagtggttgcagccggcacacacgagtcgtgtttatcaactcaaagcacaaatacttttcctcaacctaaaaataaggcaattagccaaaaacaactttgcgtgtaaacaacgctcaatacacgtgtcattttattattagctattgcttcaccgccttagctttctcgtgacctagtcgtcctcgtcttttcttcttcttcttctataaaacaatacccaaagagctcttcttcttcacaattcagatttcaatttctcaaaatcttaaaaactttctctcaattctctctaccgtgatcaaggtaaatttctgtgttccttattctctcaaaatcttcgattttgttttcgttcgatcccaatttcgtatatgttctttggtttagattctgttaatcttagatcgaagacgattttctgggtttgatcgttagatatcatcttaattctcgattagggtttcatagatatcatccgatttgttcaaataatttgagttttgtcgaataattactcttcgatttgtgatttctatctagatctggtgttagtttctagtttgtgcgatcgaatttgtagattaatctgagtttttctgattaacaccacaccaatctggtaccagaaaaggggagaagcaaaaccatgggtaaaaagcctgaactcaccgcgacgtctgtcgagaagtttctgatcgaaaagttcgacagcgtctccgacctgatgcagctctcggagggcgaagaatctcgtgctttcagcttcgatgtaggagggcgtggatatgtcctgcgggtaaatagctgcgccgatggtttctacaaagatcgttatgtttatcggcactttgcatcggccgcgctcccgattccggaagtgcttgacattggggcattcagcgagagcctgacctattgcatctcccgccgtgcacagggtgtcacgttgcaagacctgcctgaaaccgaactgcccgctgttctgcaaccggtcgcggaggcgatggatgccatcgctgcggccgatcttagccagacgagcgggttcggcccattcggaccgcaaggaatcggtcaatacactacatggcgtgatttcatatgcgcgattgctgatccccatgtgtatcactggcaaactgtgatggacgacaccgtcagtgcgtccgtcgcgcaggctctcgatgagctgatgctttgggccgaggactgccccgaagtccggcacctcgtgcacgcggatttcggctccaacaatgtcctgacggacaatggccgcataacagcggtcattgactggagcgaggcgatgttcggggattcccaatacgaggtcgccaacatcttcttctggaggccgtggttggcttgtatggagcagcagacgcgctacttcgagcggaggcatccggagcttgcaggatcgccgcggctccgggcgtatatgctccgcattggtcttgaccaactctatcagagcttggttgacggcaatttcgatgatgcagcttgggcgcagggtcgatgcgacgcaatcgtccgatccggagccgggactgtcgggcgtacacaaatcgcccgcagaagcgcggccgtctggaccgatggctgtgtagaagtactcgccgatagtggaaaccgacgccccagcactcgtccgagggcaaaggaatagatgcatcctgctttaatgagatatgcgagacgcctatgatcgcatgatatttgctttcaattctgttgtgcacgttgtaaaaaacctgagcatgtgtagctcagatccttaccgccggtttcggttcattctaatgaatatatcacccgttactatcgtatttttatgaataatattctccgttcaatttactgattgtaccctactacttatatgtacaatattaaaatgaaaacaatatattgtgctgaataggtttatagcgacatctatgatagagcgccacaataacaaacaattgcgttttattattacaaatccaattttaaaaaaagcggcagaaccggtcaaacctaaaagactgattacataaatcttattcaaatttcaaaagtgccccaggggctagtatctacgacacaccgagcggcgaactaataacgctcactgaagggaactccggttccccgccggcgcgcatgggtgagattccttgaagttgagtattggccgtccgctctaccgaaagttacgggcaccattcaacccggtccagcacggcggccgggtaaccgacttgctgccccgagaattatgcagcatttttttggtgtatgtgggccccaaatgaagtgcaggtcaaaccttgacagtgacgacaaatcgttgggcgggtccagggcgaattttgcgacaacatgtcgaggctcagcaggaccggcatgcaagctagcttactagtgatattctatagtgtcacctaaatgtattctagaccaagcatgcacagctggcgttctcagccagatccaacgttacaccacaatatatcctgccaagatctaattccggggatcggaaatccagaagcccgagaggttgccgcctttcgggctttttctttttcaaaaaaaaaaatttataaaacgatctgttgcggccggccgccgggttgtgggcaaaggcgctcgacggtgggcaaccgcttgcggttgtccacgggcggagccggtgcgcgtagcgcattgtccacaagccaagggcgaccaataattgatatatatattcataattgaaaagctaattgaacatactacttgctgtaactacttgccggagcgaggggtgtttgcaagctgttgatctgaaagggctattagcgttctcacgtgcctttttgattagcgatttcacgtgaccttattagcgatttcacgtactccgattagcgatttcacgtaccctgattagcgatttcacgtggatagtttttggagcgggccggaaagccccgtgaatcaaggctttgcggggcattagcggtttcacgtggataactaccctctatccacaggcttccggggataaaaaagcccgctcgacggcgggctgttggatggggatcgcctgaatcgccccatcatccagccagaaagtgagggagccacggttgatgagagctttgttgtaggtggaccagttggtgattttgaacttttgctttgccacggaacggtctgcgttgtcgggaagatgcgtgatctgatccttcaactcagcaaaagttcgatttattcaacaaagccacgttgtgtctcaaaatctctgatgttacattgcacaagataaaaatatatcatcatgaacaataaaactgtctgcttacataaacagtaatacaaggggtgttatgagggaagcggtgatcgccgaagtatcgactcaactatcagaggtagttggcgtcatcgagcgccatctcgaaccgacgttgctggccgtacatttgtacggctccgcagtggatggcggcctgaagccacacagtgatattgatttgctggttacggtgaccgtaaggcttgatgaaacaacgcggcgagctttgatcaacgaccttttggaaacttcggcttcccctggagagagcgagattctccgcgctgtagaagtcaccattgttgtgcacgacgacatcattccgtggcgttatccagctaagcgcgaactgcaatttggagaatggcagcgcaatgacattcttgcaggtatcttcgagccagccacgatcgacattgatctggctatcttgctgacaaaagcaagagaacatagcgttgccttggtaggtccagcggcggaggaactctttgatccggttcctgaacaggatctatttgaggcgctaaatgaaaccttaacgctatggaactcgccgcccgactgggctggcgatgagcgaaatgtagtgcttacgttgtcccgcatttggtacagcgcagtaaccggcaaaatcgcgccgaaggatgtcgctgccgactgggcaatggagcgcctgccggcccagtatcagcccgtcatacttgaagctaggcaggcttatcttggacaagaagatcgcttggcctcgcgcgcagatcagttggaagaatttgttcactacgtgaaaggcgagatcaccaaggtagtcggcaaataatcactagaccaatgttacacatatatactttagattgatttaaaacttcatttttaatttaaaaggatctaggtgaagatcctttttgataatctcatgaccaaaatcccttaacgtgagttttcgttccactgagcgtcagaccccgtagaaaagatcaaaggatcttcttgagatcctttttttctgcgcgtaatctgctgcttgcaaacaaaaaaaccaccgctaccagcggtggtttgtttgccggatcaagagctaccaactcttcttccgaaggtaactggcttcagcagagcgcagataccaaatactgttcttctagtgtagccgtagttaggccaccacttcaagaactctgtagcaccgcctacatacctcgctctgctaatcctgttaccagtggctgctgccagtggcgataagtcgtgtcttaccgggttggactcaagacgatagttaccggataaggcgcagcggtcgggctgaacggggggttcgtgcacacagcccagcttggagcgaacgacctacaccgaactgagatacctacagcgtgagctatgagaaagcgccacgcttcccgaagggagaaaggcggacaggtatccggtaagcggcagggtcggaacaggagagcgcacgagggagcttccagggggaaacgcctggtatctttatagtcctgtcgggtttcgccacctctgacttgagcgtcgatttttgtgatgctcgtcaggggggcggagcctatggaaaaacgccagcaacgcggcctttttacggttcctggccttttgctggccttttgctcacatgagatctcaaacaaacacatacagcgacttagtttacccgccaatatatcctgtcaaggctcgaactaggctcggacgaagtaagcggccgcaaccttaattaaacacggcgcgccaacagcgatcgcaccaggtacc

SEQ ID NO: 282 - DNA, 7928 bp, synthetic construct
  misc_feature 1..7928: note = pAGS-0045 CMV promoter
  source 1..7928: mol_type = other DNA
acctcctactccaaaaatgtcaaagatacagtctcagaagaccaaagggctattgagacttttcaacaaagggtaatatcgggaaacctcctcggattccattgcccagctatctgtcacttcatcaaaaggacagtagaaaaggaaggtggcacctacaaatgccatcattgcgataaaggaaaggctatcgttcaagatgcccctgccgacagtggtcccaaagatggacccccacccacgaggagcatcgtggaaaaagaagacgttccaaccacgtcttcaaagcaagtggattgatgtgatatctccactgacgtaagggatgacgcacaatcccactatccttcgcaagacccttcctctatataaggaagttcatttcatttggagaggacagccaacagtattcagtcgactggtaccaacaggctatggaagacgccaaaaacataaagaaaggcccggcgccattctatccgctggaagatggaaccgctggagagcaactgcataaggctatgaagagatacgccctggttcctggaacaattgcttttacagatgcacatatcgaggtggacatcacttacgctgagtacttcgaaatgtccgttcggttggcagaagctatgaaacgatatgggctgaatacaaatcacagaatcgtcgtatgcagtgaaaactctcttcaattctttatgccggtgttgggcgcgttatttatcggagttgcagttgcgcccgcgaacgacatttataatgaacgtgaattgctcaacagtatgggcatttcgcagcctaccgtggtgttcgtttccaaaaaggggttgcaaaaaattttgaacgtgcaaaaaaagctcccaatcatccaaaaaattattatcatggattctaaaacggattaccagggatttcagtcgatgtacacgttcgtcacatctcatctacctcccggttttaatgaatacgattttgtgccagagtccttcgatagggacaagacaattgcactgatcatgaactcctctggatctactggtctgcctaaaggtgtcgctctgcctcatagaactgcctgcgtgagattctcgcatgccagagatcctatttttggcaatcaaatcattccggatactgcgattttaagtgttgttccattccatcacggttttggaatgtttactacactcggatatttgatatgtggatttcgagtcgtcttaatgtatagatttgaagaagagctgtttctgaggagccttcaggattacaagattcaaagtgcgctgctggtgccaaccctattctccttcttcgccaaaagcactctgattgacaaatacgatttatctaatttacacgaaattgcttctggtggcgctcccctctctaaggaagtcggggaagcggttgccaagaggttccatctgccaggtatcaggcaaggatatgggctcactgagactacatcagctattctgattacacccgagggggatgataaaccgggcgcggtcggtaaagttgttccattttttgaagcgaaggttgtggatctggataccgggaaaacgctgggcgttaatcaaagaggcgaactgtgtgtgagaggtcctatgattatgtccggttatgtaaacaatccggaagcgaccaacgccttgattgacaaggatggatggctacattctggagacatagcttactgggacgaagacgaacacttcttcatcgttgaccgcctgaagtctctgattaagtacaaaggctatcaggtggctcccgctgaattggaatccatcttgctccaacaccccaacatcttcgacgcaggtgtcgcaggtcttcccgacgatgacgccggtgaacttcccgccgccgttgttgttttggagcacggaaagacgatgacggaaaaagagatcgtggattacgtcgccagtcaagtaacaaccgcgaaaaagttgcgcggaggagttgtgtttgtggacgaagtaccgaaaggtcttaccggaaaactcgacgcaagaaaaatcagagagatcctcataaaggccaagaagggcggaaagatcgccgtgtcaggtggatcctagataacctttaccttcattccctgtaaattggtaccctgcaaagctttcgttcgtatcatcggtttcgacaacgttcgtcaagttcaatgcatcagtttcattgcgcacacaccagaatcctactgagtttgagtattatggcattgggaaaactgtttttcttgtaccatttgttgtgcttgtaatttactgtgttttttattcggttttcgctatcgaactgtgaaatggaaatggatggagaagagttaatgaatgatatggtccttttgttcattctcaaattaatattatttgttttttctcttatttgttgtgtgttgaatttgaaattataagagatatgcaaacattttgttttgagtaaaaatgtgtcaaatcgtggcctctaatgaccgaagttaatatgaggagtaaaacacttgtagttgtaccattatgcttattcactaggcaacaaatatattttcagacctagaaaagctgcaaatgttactgaatacaagtatgtcctcttgtgttttagacatttatgaactttcctttatgtaattttccagaatccttgtcagattctaatcattgctttataattatagttatactcatggatttgtagttgagtatgaaaatattttttaatgcattttatgacttgccaattgattgacaacatgcatcaatcgactagtcgacgagtcagtaataaacggcgtcaaagtggttgcagccggcacacacgagtcgtgtttatcaactcaaagcacaaatacttttcctcaacctaaaaataaggcaattagccaaaaacaactttgcgtgtaaacaacgctcaatacacgtgtcattttattattagctattgcttcaccgccttagctttctcgtgacctagtcgtcctcgtcttttcttcttcttcttctataaaacaatacccaaagagctcttcttcttcacaattcagatttcaatttctcaaaatcttaaaaactttctctcaattctctctaccgtgatcaaggtaaatttctgtgttccttattctctcaaaatcttcgattttgttttcgttcgatcccaatttcgtatatgttctttggtttagattctgttaatcttagatcgaagacgattttctgggtttgatcgttagatatcatcttaattctcgattagggtttcatagatatcatccgatttgttcaaataatttgagttttgtcgaataattactcttcgatttgtgatttctatctagatctggtgttagtttctagtttgtgcgatcgaatttgtagattaatctgagtttttctgattaacaccacaccaatctggtaccagaaaaggggagaagcaaaaccatgggtaaaaagcctgaactcaccgcgacgtctgtcgagaagtttctgatcgaaaagttcgacagcgtctccgacctgatgcagctctcggagggcgaagaatctcgtgctttcagcttcgatgtaggagggcgtggatatgtcctgcgggtaaatagctgcgccgatggtttctacaaagatcgttatgtttatcggcactttgcatcggccgcgctcccgattccggaagtgcttgacattggggcattcagcgagagcctgacctattgcatctcccgccgtgcacagggtgtcacgttgcaagacctgcctgaaaccgaactgcccgctgttctgcaaccggtcgcggaggcgatggatgccatcgctgcggccgatcttagccagacgagcgggttcggcccattcggaccgcaaggaatcggtcaatacactacatggcgtgatttcatatgcgcgattgctgatccccatgtgtatcactggcaaactgtgatggacgacaccgtcagtgcgtccgtcgcgcaggctctcgatgagctgatgctttgggccgaggactgccccgaagtccggcacctcgtgcacgcggatttcggctccaacaatgtcctgacggacaatggccgcataacagcggtcattgactggagcgaggcgatgttcggggattcccaatacgaggtcgccaacatcttcttctggaggccgtggttggcttgtatggagcagcagacgcgctacttcgagcggaggcatccggagcttgcaggatcgccgcggctccgggcgtatatgctccgcattggtcttgaccaactctatcagagcttggttgacggcaatttcgatgatgcagcttgggcgcagggtcgatgcgacgcaatcgtccgatccggagccgggactgtcgggcgtacacaaatcgcccgcagaagcgcggccgtctggaccgatggctgtgtagaagtactcgccgatagtggaaaccgacgccccagcactcgtccgagggcaaaggaatagatgcatcctgctttaatgagatatgcgagacgcctatgatcgcatgatatttgctttcaattctgttgtgcacgttgtaaaaaacctgagcatgtgtagctcagatccttaccgccggtttcggttcattctaatgaatatatcacccgttactatcgtatttttatgaataatattctccgttcaatttactgattgtaccctactacttatatgtacaatattaaaatgaaaacaatatattgtgctgaataggtttatagcgacatctatgatagagcgccacaataacaaacaattgcgttttattattacaaatccaattttaaaaaaagcggcagaaccggtcaaacctaaaagactgattacataaatcttattcaaatttcaaaagtgccccaggggctagtatctacgacacaccgagcggcgaactaataacgctcactgaagggaactccggttccccgccggcgcgcatgggtgagattccttgaagttgagtattggccgtccgctctaccgaaagttacgggcaccattcaacccggtccagcacggcggccgggtaaccgacttgctgccccgagaattatgcagcatttttttggtgtatgtgggccccaaatgaagtgcaggtcaaaccttgacagtgacgacaaatcgttgggcgggtccagggcgaattttgcgacaacatgtcgaggctcagcaggaccggcatgcaagctagcttactagtgatattctatagtgtcacctaaatgtattctagaccaagcatgcacagctggcgttctcagccagatccaacgttacaccacaatatatcctgccaagatctaattccggggatcggaaatccagaagcccgagaggttgccgcctttcgggctttttctttttcaaaaaaaaaaatttataaaacgatctgttgcggccggccgccgggttgtgggcaaaggcgctcgacggtgggcaaccgcttgcggttgtccacgggcggagccggtgcgcgtagcgcattgtccacaagccaagggcgaccaataattgatatatatattcataattgaaaagctaattgaacatactacttgctgtaactacttgccggagcgaggggtgtttgcaagctgttgatctgaaagggctattagcgttctcacgtgcctttttgattagcgatttcacgtgaccttattagcgatttcacgtactccgattagcgatttcacgtaccctgattagcgatttcacgtggatagtttttggagcgggccggaaagccccgtgaatcaaggctttgcggggcattagcggtttcacgtggataactaccctctatccacaggcttccggggataaaaaagcccgctcgacggcgggctgttggatggggatcgcctgaatcgccccatcatccagccagaaagtgagggagccacggttgatgagagctttgttgtaggtggaccagttggtgattttgaacttttgctttgccacggaacggtctgcgttgtcgggaagatgcgtgatctgatccttcaactcagcaaaagttcgatttattcaacaaagccacgttgtgtctcaaaatctctgatgttacattgcacaagataaaaatatatcatcatgaacaataaaactgtctgcttacataaacagtaatacaaggggtgttatgagggaagcggtgatcgccgaagtatcgactcaactatcagaggtagttggcgtcatcgagcgccatctcgaaccgacgttgctggccgtacatttgtacggctccgcagtggatggcggcctgaagccacacagtgatattgatttgctggttacggtgaccgtaaggcttgatgaaacaacgcggcgagctttgatcaacgaccttttggaaacttcggcttcccctggagagagcgagattctccgcgctgtagaagtcaccattgttgtgcacgacgacatcattccgtggcgttatccagctaagcgcgaactgcaatttggagaatggcagcgcaatgacattcttgcaggtatcttcgagccagccacgatcgacattgatctggctatcttgctgacaaaagcaagagaacatagcgttgccttggtaggtccagcggcggaggaactctttgatccggttcctgaacaggatctatttgaggcgctaaatgaaaccttaacgctatggaactcgccgcccgactgggctggcgatgagcgaaatgtagtgcttacgttgtcccgcatttggtacagcgcagtaaccggcaaaatcgcgccgaaggatgtcgctgccgactgggcaatggagcgcctgccggcccagtatcagcccgtcatacttgaagctaggcaggcttatcttggacaagaagatcgcttggcctcgcgcgcagatcagttggaagaatttgttcactacgtgaaaggcgagatcaccaaggtagtcggcaaataatcactagaccaatgttacacatatatactttagattgatttaaaacttcatttttaatttaaaaggatctaggtgaagatcctttttgataatctcatgaccaaaatcccttaacgtgagttttcgttccactgagcgtcagaccccgtagaaaagatcaaaggatcttcttgagatcctttttttctgcgcgtaatctgctgcttgcaaacaaaaaaaccaccgctaccagcggtggtttgtttgccggatcaagagctaccaactcttcttccgaaggtaactggcttcagcagagcgcagataccaaatactgttcttctagtgtagccgtagttaggccaccacttcaagaactctgtagcaccgcctacatacctcgctctgctaatcctgttaccagtggctgctgccagtggcgataagtcgtgtcttaccgggttggactcaagacgatagttaccggataaggcgcagcggtcgggctgaacggggggttcgtgcacacagcccagcttggagcgaacgacctacaccgaactgagatacctacagcgtgagctatgagaaagcgccacgcttcccgaagggagaaaggcggacaggtatccggtaagcggcagggtcggaacaggagagcgcacgagggagcttccagggggaaacgcctggtatctttatagtcctgtcgggtttcgccacctctgacttgagcgtcgatttttgtgatgctcgtcaggggggcggagcctatggaaaaacgccagcaacgcggcctttttacggttcctggccttttgctggccttttgctcacatgagatctcaaacaaacacatacagcgacttagtttacccgccaatatatcctgtcaaggctcgaactaggctcggacgaagtaagcggccgcaaccttaattaaacacggcgcgccaacagcgatcgcaccaggtacc

SEQ ID NO: 283 - DNA, 7954 bp, synthetic construct
  misc_feature 1..7954: note = pAGS-0046 CMV promoter+ enhancer
  source 1..7954: mol_type = other DNA
acctgtgtaatgtattggtaatttgggaagatataataggaagcaaggctatttatccatttctgaaaaggcgaaatggcgtcaccgcgagcgtcacgcgcattccgttcttgctgtaaagcgttgtttggtacacttttgactagcgaggcttggcgtgtcagcgtatctattcaaaagtcgttaatggctgcggatcaagaaaaagttggaatagaaacagaatacccgcgaaattcaggcccggttgccatgtcctacacgccgaaataaacgaccaaattagtagaaaaataaaaactgactcggatacttacgtcacgtcttgcgcactgatttgaaaaatctcaatataaacaaagacggccacaagaaaaaaccaaaacaccgatattcattaatcttatctagtttctcaaaaaaatcataacagtattcagtcgactggtaccaacaggctatggaagacgccaaaaacataaagaaaggcccggcgccattctatccgctggaagatggaaccgctggagagcaactgcataaggctatgaagagatacgccctggttcctggaacaattgcttttacagatgcacatatcgaggtggacatcacttacgctgagtacttcgaaatgtccgttcggttggcagaagctatgaaacgatatgggctgaatacaaatcacagaatcgtcgtatgcagtgaaaactctcttcaattctttatgccggtgttgggcgcgttatttatcggagttgcagttgcgcccgcgaacgacatttataatgaacgtgaattgctcaacagtatgggcatttcgcagcctaccgtggtgttcgtttccaaaaaggggttgcaaaaaattttgaacgtgcaaaaaaagctcccaatcatccaaaaaattattatcatggattctaaaacggattaccagggatttcagtcgatgtacacgttcgtcacatctcatctacctcccggttttaatgaatacgattttgtgccagagtccttcgatagggacaagacaattgcactgatcatgaactcctctggatctactggtctgcctaaaggtgtcgctctgcctcatagaactgcctgcgtgagattctcgcatgccagagatcctatttttggcaatcaaatcattccggatactgcgattttaagtgttgttccattccatcacggttttggaatgtttactacactcggatatttgatatgtggatttcgagtcgtcttaatgtatagatttgaagaagagctgtttctgaggagccttcaggattacaagattcaaagtgcgctgctggtgccaaccctattctccttcttcgccaaaagcactctgattgacaaatacgatttatctaatttacacgaaattgcttctggtggcgctcccctctctaaggaagtcggggaagcggttgccaagaggttccatctgccaggtatcaggcaaggatatgggctcactgagactacatcagctattctgattacacccgagggggatgataaaccgggcgcggtcggtaaagttgttccattttttgaagcgaaggttgtggatctggataccgggaaaacgctgggcgttaatcaaagaggcgaactgtgtgtgagaggtcctatgattatgtccggttatgtaaacaatccggaagcgaccaacgccttgattgacaaggatggatggctacattctggagacatagcttactgggacgaagacgaacacttcttcatcgttgaccgcctgaagtctctgattaagtacaaaggctatcaggtggctcccgctgaattggaatccatcttgctccaacaccccaacatcttcgacgcaggtgtcgcaggtcttcccgacgatgacgccggtgaacttcccgccgccgttgttgttttggagcacggaaagacgatgacggaaaaagagatcgtggattacgtcgccagtcaagtaacaaccgcgaaaaagttgcgcggaggagttgtgtttgtggacgaagtaccgaaaggtcttaccggaaaactcgacgcaagaaaaatcagagagatcctcataaaggccaagaagggcggaaagatcgccgtgtcaggtggatcctagataacctttaccttcattccctgtaaattggtaccctgcaaagctttcgttcgtatcatcggtttcgacaacgttcgtcaagttcaatgcatcagtttcattgcgcacacaccagaatcctactgagtttgagtattatggcattgggaaaactgtttttcttgtaccatttgttgtgcttgtaatttactgtgttttttattcggttttcgctatcgaactgtgaaatggaaatggatggagaagagttaatgaatgatatggtccttttgttcattctcaaattaatattatttgttttttctcttatttgttgtgtgttgaatttgaaattataagagatatgcaaacattttgttttgagtaaaaatgtgtcaaatcgtggcctctaatgaccgaagttaatatgaggagtaaaacacttgtagttgtaccattatgcttattcactaggcaacaaatatattttcagacctagaaaagctgcaaatgttactgaatacaagtatgtcctcttgtgttttagacatttatgaactttcctttatgtaattttccagaatccttgtcagattctaatcattgctttataattatagttatactcatggatttgtagttgagtatgaaaatattttttaatgcattttatgacttgccaattgattgacaacatgcatcaatcgactagtcgacgagtcagtaataaacggcgtcaaagtggttgcagccggcacacacgagtcgtgtttatcaactcaaagcacaaatacttttcctcaacctaaaaataaggcaattagccaaaaacaactttgcgtgtaaacaacgctcaatacacgtgtcattttattattagctattgcttcaccgccttagctttctcgtgacctagtcgtcctcgtcttttcttcttcttcttctataaaacaatacccaaagagctcttcttcttcacaattcagatttcaatttctcaaaatcttaaaaactttctctcaattctctctaccgtgatcaaggtaaatttctgtgttccttattctctcaaaatcttcgattttgttttcgttcgatcccaatttcgtatatgttctttggtttagattctgttaatcttagatcgaagacgattttctgggtttgatcgttagatatcatcttaattctcgattagggtttcatagatatcatccgatttgttcaaataatttgagttttgtcgaataattactcttcgatttgtgatttctatctagatctggtgttagtttctagtttgtgcgatcgaatttgtagattaatctgagtttttctgattaacaccacaccaatctggtaccagaaaaggggagaagcaaaaccatgggtaaaaagcctgaactcaccgcgacgtctgtcgagaagtttctgatcgaaaagttcgacagcgtctccgacctgatgcagctctcggagggcgaagaatctcgtgctttcagcttcgatgtaggagggcgtggatatgtcctgcgggtaaatagctgcgccgatggtttctacaaagatcgttatgtttatcggcactttgcatcggccgcgctcccgattccggaagtgcttgacattggggcattcagcgagagcctgacctattgcatctcccgccgtgcacagggtgtcacgttgcaagacctgcctgaaaccgaactgcccgctgttctgcaaccggtcgcggaggcgatggatgccatcgctgcggccgatcttagccagacgagcgggttcggcccattcggaccgcaaggaatcggtcaatacactacatggcgtgatttcatatgcgcgattgctgatccccatgtgtatcactggcaaactgtgatggacgacaccgtcagtgcgtccgtcgcgcaggctctcgatgagctgatgctttgggccgaggactgccccgaagtccggcacctcgtgcacgcggatttcggctccaacaatgtcctgacggacaatggccgcataacagcggtcattgactggagcgaggcgatgttcggggattcccaatacgaggtcgccaacatcttcttctggaggccgtggttggcttgtatggagcagcagacgcgctacttcgagcggaggcatccggagcttgcaggatcgccgcggctccgggcgtatatgctccgcattggtcttgaccaactctatcagagcttggttgacggcaatttcgatgatgcagcttgggcgcagggtcgatgcgacgcaatcgtccgatccggagccgggactgtcgggcgtacacaaatcgcccgcagaagcgcggccgtctggaccgatggctgtgtagaagtactcgccgatagtggaaaccgacgccccagcactcgtccgagggcaaaggaatagatgcatcctgctttaatgagatatgcgagacgcctatgatcgcatgatatttgctttcaattctgttgtgcacgttgtaaaaaacctgagcatgtgtagctcagatccttaccgccggtttcggttcattctaatgaatatatcacccgttactatcgtatttttatgaataatattctccgttcaatttactgattgtaccctactacttatatgtacaatattaaaatgaaaacaatatattgtgctgaataggtttatagcgacatctatgatagagcgccacaataacaaacaattgcgttttattattacaaatccaattttaaaaaaagcggcagaaccggtcaaacctaaaagactgattacataaatcttattcaaatttcaaaagtgccccaggggctagtatctacgacacaccgagcggcgaactaataacgctcactgaagggaactccggttccccgccggcgcgcatgggtgagattccttgaagttgagtattggccgtccgctctaccgaaagttacgggcaccattcaacccggtccagcacggcggccgggtaaccgacttgctgccccgagaattatgcagcatttttttggtgtatgtgggccccaaatgaagtgcaggtcaaaccttgacagtgacgacaaatcgttgggcgggtccagggcgaattttgcgacaacatgtcgaggctcagcaggaccggcatgcaagctagcttactagtgatattctatagtgtcacctaaatgtattctagaccaagcatgcacagctggcgttctcagccagatccaacgttacaccacaatatatcctgccaagatctaattccggggatcggaaatccagaagcccgagaggttgccgcctttcgggctttttctttttcaaaaaaaaaaatttataaaacgatctgttgcggccggccgccgggttgtgggcaaaggcgctcgacggtgggcaaccgcttgcggttgtccacgggcggagccggtgcgcgtagcgcattgtccacaagccaagggcgaccaataattgatatatatattcataattgaaaagctaattgaacatactacttgctgtaactacttgccggagcgaggggtgtttgcaagctgttgatctgaaagggctattagcgttctcacgtgcctttttgattagcgatttcacgtgaccttattagcgatttcacgtactccgattagcgatttcacgtaccctgattagcgatttcacgtggatagtttttggagcgggccggaaagccccgtgaatcaaggctttgcggggcattagcggtttcacgtggataactaccctctatccacaggcttccggggataaaaaagcccgctcgacggcgggctgttggatggggatcgcctgaatcgccccatcatccagccagaaagtgagggagccacggttgatgagagctttgttgtaggtggaccagttggtgattttgaacttttgctttgccacggaacggtctgcgttgtcgggaagatgcgtgatctgatccttcaactcagcaaaagttcgatttattcaacaaagccacgttgtgtctcaaaatctctgatgttacattgcacaagataaaaatatatcatcatgaacaataaaactgtctgcttacataaacagtaatacaaggggtgttatgagggaagcggtgatcgccgaagtatcgactcaactatcagaggtagttggcgtcatcgagcgccatctcgaaccgacgttgctggccgtacatttgtacggctccgcagtggatggcggcctgaagccacacagtgatattgatttgctggttacggtgaccgtaaggcttgatgaaacaacgcggcgagctttgatcaacgaccttttggaaacttcggcttcccctggagagagcgagattctccgcgctgtagaagtcaccattgttgtgcacgacgacatcattccgtggcgttatccagctaagcgcgaactgcaatttggagaatggcagcgcaatgacattcttgcaggtatcttcgagccagccacgatcgacattgatctggctatcttgctgacaaaagcaagagaacatagcgttgccttggtaggtccagcggcggaggaactctttgatccggttcctgaacaggatctatttgaggcgctaaatgaaaccttaacgctatggaactcgccgcccgactgggctggcgatgagcgaaatgtagtgcttacgttgtcccgcatttggtacagcgcagtaaccggcaaaatcgcgccgaaggatgtcgctgccgactgggcaatggagcgcctgccggcccagtatcagcccgtcatacttgaagctaggcaggcttatcttggacaagaagatcgcttggcctcgcgcgcagatcagttggaagaatttgttcactacgtgaaaggcgagatcaccaaggtagtcggcaaataatcactagaccaatgttacacatatatactttagattgatttaaaacttcatttttaatttaaaaggatctaggtgaagatcctttttgataatctcatgaccaaaatcccttaacgtgagttttcgttccactgagcgtcagaccccgtagaaaagatcaaaggatcttcttgagatcctttttttctgcgcgtaatctgctgcttgcaaacaaaaaaaccaccgctaccagcggtggtttgtttgccggatcaagagctaccaactcttcttccgaaggtaactggcttcagcagagcgcagataccaaatactgttcttctagtgtagccgtagttaggccaccacttcaagaactctgtagcaccgcctacatacctcgctctgctaatcctgttaccagtggctgctgccagtggcgataagtcgtgtcttaccgggttggactcaagacgatagttaccggataaggcgcagcggtcgggctgaacggggggttcgtgcacacagcccagcttggagcgaacgacctacaccgaactgagatacctacagcgtgagctatgagaaagcgccacgcttcccgaagggagaaaggcggacaggtatccggtaagcggcagggtcggaacaggagagcgcacgagggagcttccagggggaaacgcctggtatctttatagtcctgtcgggtttcgccacctctgacttgagcgtcgatttttgtgatgctcgtcaggggggcggagcctatggaaaaacgccagcaacgcggcctttttacggttcctggccttttgctggccttttgctcacatgagatctcaaacaaacacatacagcgacttagtttacccgccaatatatcctgtcaaggctcgaactaggctcggacgaagtaagcggccgcaaccttaattaaacacggcgcgccaacagcgatcgcaccaggtacc

SEQ ID NO: 284 - DNA, 8023 bp, synthetic construct
  misc_feature 1..8023: note = pAGS-0047 SV40 promoter
  source 1..8023: mol_type = other DNA
acctgctgaggcttgacatgattggtgcgtatgtttgtatgaagctacaggactgatttggcgggctatgagggcgggggaagctctggaagggccgcgatggggcgcgcggcgtccagaaggcgccatacggcccgctggcggcacccatccggtataaaagcccgcgaccccgaacggtgacctccactttcagcgacaaacgagcacttatacatacgcgactattctgccgctatacataaccactcagctagcttaagatcccatcaagcttgcatgccgggcgcgccagaaggagcgcagccaaaccaggatgatgtttgatggggtatttgagcacttgcaacccttatccggaagccccctggcccacaaaggctaggcgccaatgcaagcagttcgcatgcagcccctggagcggtgccctcctgataaaccggccagggggcctatgttctttacttttttacaagagaagtcactcaacatcttaaaacagtattcagtcgactggtaccaacaggctatggaagacgccaaaaacataaagaaaggcccggcgccattctatccgctggaagatggaaccgctggagagcaactgcataaggctatgaagagatacgccctggttcctggaacaattgcttttacagatgcacatatcgaggtggacatcacttacgctgagtacttcgaaatgtccgttcggttggcagaagctatgaaacgatatgggctgaatacaaatcacagaatcgtcgtatgcagtgaaaactctcttcaattctttatgccggtgttgggcgcgttatttatcggagttgcagttgcgcccgcgaacgacatttataatgaacgtgaattgctcaacagtatgggcatttcgcagcctaccgtggtgttcgtttccaaaaaggggttgcaaaaaattttgaacgtgcaaaaaaagctcccaatcatccaaaaaattattatcatggattctaaaacggattaccagggatttcagtcgatgtacacgttcgtcacatctcatctacctcccggttttaatgaatacgattttgtgccagagtccttcgatagggacaagacaattgcactgatcatgaactcctctggatctactggtctgcctaaaggtgtcgctctgcctcatagaactgcctgcgtgagattctcgcatgccagagatcctatttttggcaatcaaatcattccggatactgcgattttaagtgttgttccattccatcacggttttggaatgtttactacactcggatatttgatatgtggatttcgagtcgtcttaatgtatagatttgaagaagagctgtttctgaggagccttcaggattacaagattcaaagtgcgctgctggtgccaaccctattctccttcttcgccaaaagcactctgattgacaaatacgatttatctaatttacacgaaattgcttctggtggcgctcccctctctaaggaagtcggggaagcggttgccaagaggttccatctgccaggtatcaggcaaggatatgggctcactgagactacatcagctattctgattacacccgagggggatgataaaccgggcgcggtcggtaaagttgttccattttttgaagcgaaggttgtggatctggataccgggaaaacgctgggcgttaatcaaagaggcgaactgtgtgtgagaggtcctatgattatgtccggttatgtaaacaatccggaagcgaccaacgccttgattgacaaggatggatggctacattctggagacatagcttactgggacgaagacgaacacttcttcatcgttgaccgcctgaagtctctgattaagtacaaaggctatcaggtggctcccgctgaattggaatccatcttgctccaacaccccaacatcttcgacgcaggtgtcgcaggtcttcccgacgatgacgccggtgaacttcccgccgccgttgttgttttggagcacggaaagacgatgacggaaaaagagatcgtggattacgtcgccagtcaagtaacaaccgcgaaaaagttgcgcggaggagttgtgtttgtggacgaagtaccgaaaggtcttaccggaaaactcgacgcaagaaaaatcagagagatcctcataaaggccaagaagggcggaaagatcgccgtgtcaggtggatcctagataacctttaccttcattccctgtaaattggtaccctgcaaagctttcgttcgtatcatcggtttcgacaacgttcgtcaagttcaatgcatcagtttcattgcgcacacaccagaatcctactgagtttgagtattatggcattgggaaaactgtttttcttgtaccatttgttgtgcttgtaatttactgtgttttttattcggttttcgctatcgaactgtgaaatggaaatggatggagaagagttaatgaatgatatggtccttttgttcattctcaaattaatattatttgttttttctcttatttgttgtgtgttgaatttgaaattataagagatatgcaaacattttgttttgagtaaaaatgtgtcaaatcgtggcctctaatgaccgaagttaatatgaggagtaaaacacttgtagttgtaccattatgcttattcactaggcaacaaatatattttcagacctagaaaagctgcaaatgttactgaatacaagtatgtcctcttgtgttttagacatttatgaactttcctttatgtaattttccagaatccttgtcagattctaatcattgctttataattatagttatactcatggatttgtagttgagtatgaaaatattttttaatgcattttatgacttgccaattgattgacaacatgcatcaatcgactagtcgacgagtcagtaataaacggcgtcaaagtggttgcagccggcacacacgagtcgtgtttatcaactcaaagcacaaatacttttcctcaacctaaaaataaggcaattagccaaaaacaactttgcgtgtaaacaacgctcaatacacgtgtcattttattattagctattgcttcaccgccttagctttctcgtgacctagtcgtcctcgtcttttcttcttcttcttctataaaacaatacccaaagagctcttcttcttcacaattcagatttcaatttctcaaaatcttaaaaactttctctcaattctctctaccgtgatcaaggtaaatttctgtgttccttattctctcaaaatcttcgattttgttttcgttcgatcccaatttcgtatatgttctttggtttagattctgttaatcttagatcgaagacgattttctgggtttgatcgttagatatcatcttaattctcgattagggtttcatagatatcatccgatttgttcaaataatttgagttttgtcgaataattactcttcgatttgtgatttctatctagatctggtgttagtttctagtttgtgcgatcgaatttgtagattaatctgagtttttctgattaacaccacaccaatctggtaccagaaaaggggagaagcaaaaccatgggtaaaaagcctgaactcaccgcgacgtctgtcgagaagtttctgatcgaaaagttcgacagcgtctccgacctgatgcagctctcggagggcgaagaatctcgtgctttcagcttcgatgtaggagggcgtggatatgtcctgcgggtaaatagctgcgccgatggtttctacaaagatcgttatgtttatcggcactttgcatcggccgcgctcccgattccggaagtgcttgacattggggcattcagcgagagcctgacctattgcatctcccgccgtgcacagggtgtcacgttgcaagacctgcctgaaaccgaactgcccgctgttctgcaaccggtcgcggaggcgatggatgccatcgctgcggccgatcttagccagacgagcgggttcggcccattcggaccgcaaggaatcggtcaatacactacatggcgtgatttcatatgcgcgattgctgatccccatgtgtatcactggcaaactgtgatggacgacaccgtcagtgcgtccgtcgcgcaggctctcgatgagctgatgctttgggccgaggactgccccgaagtccggcacctcgtgcacgcggatttcggctccaacaatgtcctgacggacaatggccgcataacagcggtcattgactggagcgaggcgatgttcggggattcccaatacgaggtcgccaacatcttcttctggaggccgtggttggcttgtatggagcagcagacgcgctacttcgagcggaggcatccggagcttgcaggatcgccgcggctccgggcgtatatgctccgcattggtcttgaccaactctatcagagcttggttgacggcaatttcgatgatgcagcttgggcgcagggtcgatgcgacgcaatcgtccgatccggagccgggactgtcgggcgtacacaaatcgcccgcagaagcgcggccgtctggaccgatggctgtgtagaagtactcgccgatagtggaaaccgacgccccagcactcgtccgagggcaaaggaatagatgcatcctgctttaatgagatatgcgagacgcctatgatcgcatgatatttgctttcaattctgttgtgcacgttgtaaaaaacctgagcatgtgtagctcagatccttaccgccggtttcggttcattctaatgaatatatcacccgttactatcgtatttttatgaataatattctccgttcaatttactgattgtaccctactacttatatgtacaatattaaaatgaaaacaatatattgtgctgaataggtttatagcgacatctatgatagagcgccacaataacaaacaattgcgttttattattacaaatccaattttaaaaaaagcggcagaaccggtcaaacctaaaagactgattacataaatcttattcaaatttcaaaagtgccccaggggctagtatctacgacacaccgagcggcgaactaataacgctcactgaagggaactccggttccccgccggcgcgcatgggtgagattccttgaagttgagtattggccgtccgctctaccgaaagttacgggcaccattcaacccggtccagcacggcggccgggtaaccgacttgctgccccgagaattatgcagcatttttttggtgtatgtgggccccaaatgaagtgcaggtcaaaccttgacagtgacgacaaatcgttgggcgggtccagggcgaattttgcgacaacatgtcgaggctcagcaggaccggcatgcaagctagcttactagtgatattctatagtgtcacctaaatgtattctagaccaagcatgcacagctggcgttctcagccagatccaacgttacaccacaatatatcctgccaagatctaattccggggatcggaaatccagaagcccgagaggttgccgcctttcgggctttttctttttcaaaaaaaaaaatttataaaacgatctgttgcggccggccgccgggttgtgggcaaaggcgctcgacggtgggcaaccgcttgcggttgtccacgggcggagccggtgcgcgtagcgcattgtccacaagccaagggcgaccaataattgatatatatattcataattgaaaagctaattgaacatactacttgctgtaactacttgccggagcgaggggtgtttgcaagctgttgatctgaaagggctattagcgttctcacgtgcctttttgattagcgatttcacgtgaccttattagcgatttcacgtactccgattagcgatttcacgtaccctgattagcgatttcacgtggatagtttttggagcgggccggaaagccccgtgaatcaaggctttgcggggcattagcggtttcacgtggataactaccctctatccacaggcttccggggataaaaaagcccgctcgacggcgggctgttggatggggatcgcctgaatcgccccatcatccagccagaaagtgagggagccacggttgatgagagctttgttgtaggtggaccagttggtgattttgaacttttgctttgccacggaacggtctgcgttgtcgggaagatgcgtgatctgatccttcaactcagcaaaagttcgatttattcaacaaagccacgttgtgtctcaaaatctctgatgttacattgcacaagataaaaatatatcatcatgaacaataaaactgtctgcttacataaacagtaatacaaggggtgttatgagggaagcggtgatcgccgaagtatcgactcaactatcagaggtagttggcgtcatcgagcgccatctcgaaccgacgttgctggccgtacatttgtacggctccgcagtggatggcggcctgaagccacacagtgatattgatttgctggttacggtgaccgtaaggcttgatgaaacaacgcggcgagctttgatcaacgaccttttggaaacttcggcttcccctggagagagcgagattctccgcgctgtagaagtcaccattgttgtgcacgacgacatcattccgtggcgttatccagctaagcgcgaactgcaatttggagaatggcagcgcaatgacattcttgcaggtatcttcgagccagccacgatcgacattgatctggctatcttgctgacaaaagcaagagaacatagcgttgccttggtaggtccagcggcggaggaactctttgatccggttcctgaacaggatctatttgaggcgctaaatgaaaccttaacgctatggaactcgccgcccgactgggctggcgatgagcgaaatgtagtgcttacgttgtcccgcatttggtacagcgcagtaaccggcaaaatcgcgccgaaggatgtcgctgccgactgggcaatggagcgcctgccggcccagtatcagcccgtcatacttgaagctaggcaggcttatcttggacaagaagatcgcttggcctcgcgcgcagatcagttggaagaatttgttcactacgtgaaaggcgagatcaccaaggtagtcggcaaataatcactagaccaatgttacacatatatactttagattgatttaaaacttcatttttaatttaaaaggatctaggtgaagatcctttttgataatctcatgaccaaaatcccttaacgtgagttttcgttccactgagcgtcagaccccgtagaaaagatcaaaggatcttcttgagatcctttttttctgcgcgtaatctgctgcttgcaaacaaaaaaaccaccgctaccagcggtggtttgtttgccggatcaagagctaccaactcttcttccgaaggtaactggcttcagcagagcgcagataccaaatactgttcttctagtgtagccgtagttaggccaccacttcaagaactctgtagcaccgcctacatacctcgctctgctaatcctgttaccagtggctgctgccagtggcgataagtcgtgtcttaccgggttggactcaagacgatagttaccggataaggcgcagcggtcgggctgaacggggggttcgtgcacacagcccagcttggagcgaacgacctacaccgaactgagatacctacagcgtgagctatgagaaagcgccacgcttcccgaagggagaaaggcggacaggtatccggtaagcggcagggtcggaacaggagagcgcacgagggagcttccagggggaaacgcctggtatctttatagtcctgtcgggtttcgccacctctgacttgagcgtcgatttttgtgatgctcgtcaggggggcggagcctatggaaaaacgccagcaacgcggcctttttacggttcctggccttttgctggccttttgctcacatgagatctcaaacaaacacatacagcgacttagtttacccgccaatatatcctgtcaaggctcgaactaggctcggacgaagtaagcggccgcaaccttaattaaacacggcgcgccaacagcgatcgcaccaggtacc

SEQ ID NO: 285 - DNA, 8351 bp, synthetic construct
  misc_feature 1..8351: note = pAGS-0048 SV40 promoter +enhancer
  source 1..8351: mol_type = other DNA
acctgatcccacacacctgcccgtctgcctgacaggaagtgaacgcatgtcgagggaggcctcaccaatcgtcacacgagccctcgtcagaaacacgtctccgccacgctctccctctcactgccgaccccgcagcccttttgccctttcctaggccaccgacaggacccaggcgctctcagcatgcctcaacaacccgtactcgtgccagcggtgcccttgtgctggtgatcgcttggaagcgcatgcgaagacgaaggggcggagcaggcggcctggctgttcgaagggctcgccgccagttcgggtgcctttctccacgcgcgcctccacacctaccgatgcgtgaaggcaggcaaatgctcatgtttgcccgaactcggagtccttaaaaagccgcttcttgtcgtcgttccgagacatgttagcagatcgcagtgccacctttcctgacgcgctcggccccatattcggacgcaattgtcatttgtagcacaattggagcaaatctggcgaggcagtaggcttttaagttgcaaggcgagagagcaaagtgggacgcggcgtgattattggtatttacgcgacggcccggcgcgttagcggcccttcccccaggccagggacgattatgtatcaatattgttgcgttcgggcactcgtgcgagggctcctgcgggctggggagggggatctgggaattggaggtacgaccgagatggcttgctcggggggaggtttcctcgccgagcaagccagggttaggtgttgcgctcttgactcgttgtgcattctaggaccccactgctactcacaacaagccaaaacagtattcagtcgactggtaccaacaggctatggaagacgccaaaaacataaagaaaggcccggcgccattctatccgctggaagatggaaccgctggagagcaactgcataaggctatgaagagatacgccctggttcctggaacaattgcttttacagatgcacatatcgaggtggacatcacttacgctgagtacttcgaaatgtccgttcggttggcagaagctatgaaacgatatgggctgaatacaaatcacagaatcgtcgtatgcagtgaaaactctcttcaattctttatgccggtgttgggcgcgttatttatcggagttgcagttgcgcccgcgaacgacatttataatgaacgtgaattgctcaacagtatgggcatttcgcagcctaccgtggtgttcgtttccaaaaaggggttgcaaaaaattttgaacgtgcaaaaaaagctcccaatcatccaaaaaattattatcatggattctaaaacggattaccagggatttcagtcgatgtacacgttcgtcacatctcatctacctcccggttttaatgaatacgattttgtgccagagtccttcgatagggacaagacaattgcactgatcatgaactcctctggatctactggtctgcctaaaggtgtcgctctgcctcatagaactgcctgcgtgagattctcgcatgccagagatcctatttttggcaatcaaatcattccggatactgcgattttaagtgttgttccattccatcacggttttggaatgtttactacactcggatatttgatatgtggatttcgagtcgtcttaatgtatagatttgaagaagagctgtttctgaggagccttcaggattacaagattcaaagtgcgctgctggtgccaaccctattctccttcttcgccaaaagcactctgattgacaaatacgatttatctaatttacacgaaattgcttctggtggcgctcccctctctaaggaagtcggggaagcggttgccaagaggttccatctgccaggtatcaggcaaggatatgggctcactgagactacatcagctattctgattacacccgagggggatgataaaccgggcgcggtcggtaaagttgttccattttttgaagcgaaggttgtggatctggataccgggaaaacgctgggcgttaatcaaagaggcgaactgtgtgtgagaggtcctatgattatgtccggttatgtaaacaatccggaagcgaccaacgccttgattgacaaggatggatggctacattctggagacatagcttactgggacgaagacgaacacttcttcatcgttgaccgcctgaagtctctgattaagtacaaaggctatcaggtggctcccgctgaattggaatccatcttgctccaacaccccaacatcttcgacgcaggtgtcgcaggtcttcccgacgatgacgccggtgaacttcccgccgccgttgttgttttggagcacggaaagacgatgacggaaaaagagatcgtggattacgtcgccagtcaagtaacaaccgcgaaaaagttgcgcggaggagttgtgtttgtggacgaagtaccgaaaggtcttaccggaaaactcgacgcaagaaaaatcagagagatcctcataaaggccaagaagggcggaaagatcgccgtgtcaggtggatcctagataacctttaccttcattccctgtaaattggtaccctgcaaagctttcgttcgtatcatcggtttcgacaacgttcgtcaagttcaatgcatcagtttcattgcgcacacaccagaatcctactgagtttgagtattatggcattgggaaaactgtttttcttgtaccatttgttgtgcttgtaatttactgtgttttttattcggttttcgctatcgaactgtgaaatggaaatggatggagaagagttaatgaatgatatggtccttttgttcattctcaaattaatattatttgttttttctcttatttgttgtgtgttgaatttgaaattataagagatatgcaaacattttgttttgagtaaaaatgtgtcaaatcgtggcctctaatgaccgaagttaatatgaggagtaaaacacttgtagttgtaccattatgcttattcactaggcaacaaatatattttcagacctagaaaagctgcaaatgttactgaatacaagtatgtcctcttgtgttttagacatttatgaactttcctttatgtaattttccagaatccttgtcagattctaatcattgctttataattatagttatactcatggatttgtagttgagtatgaaaatattttttaatgcattttatgacttgccaattgattgacaacatgcatcaatcgactagtcgacgagtcagtaataaacggcgtcaaagtggttgcagccggcacacacgagtcgtgtttatcaactcaaagcacaaatacttttcctcaacctaaaaataaggcaattagccaaaaacaactttgcgtgtaaacaacgctcaatacacgtgtcattttattattagctattgcttcaccgccttagctttctcgtgacctagtcgtcctcgtcttttcttcttcttcttctataaaacaatacccaaagagctcttcttcttcacaattcagatttcaatttctcaaaatcttaaaaactttctctcaattctctctaccgtgatcaaggtaaatttctgtgttccttattctctcaaaatcttcgattttgttttcgttcgatcccaatttcgtatatgttctttggtttagattctgttaatcttagatcgaagacgattttctgggtttgatcgttagatatcatcttaattctcgattagggtttcatagatatcatccgatttgttcaaataatttgagttttgtcgaataattactcttcgatttgtgatttctatctagatctggtgttagtttctagtttgtgcgatcgaatttgtagattaatctgagtttttctgattaacaccacaccaatctggtaccagaaaaggggagaagcaaaaccatgggtaaaaagcctgaactcaccgcgacgtctgtcgagaagtttctgatcgaaaagttcgacagcgtctccgacctgatgcagctctcggagggcgaagaatctcgtgctttcagcttcgatgtaggagggcgtggatatgtcctgcgggtaaatagctgcgccgatggtttctacaaagatcgttatgtttatcggcactttgcatcggccgcgctcccgattccggaagtgcttgacattggggcattcagcgagagcctgacctattgcatctcccgccgtgcacagggtgtcacgttgcaagacctgcctgaaaccgaactgcccgctgttctgcaaccggtcgcggaggcgatggatgccatcgctgcggccgatcttagccagacgagcgggttcggcccattcggaccgcaaggaatcggtcaatacactacatggcgtgatttcatatgcgcgattgctgatccccatgtgtatcactggcaaactgtgatggacgacaccgtcagtgcgtccgtcgcgcaggctctcgatgagctgatgctttgggccgaggactgccccgaagtccggcacctcgtgcacgcggatttcggctccaacaatgtcctgacggacaatggccgcataacagcggtcattgactggagcgaggcgatgttcggggattcccaatacgaggtcgccaacatcttcttctggaggccgtggttggcttgtatggagcagcagacgcgctacttcgagcggaggcatccggagcttgcaggatcgccgcggctccgggcgtatatgctccgcattggtcttgaccaactctatcagagcttggttgacggcaatttcgatgatgcagcttgggcgcagggtcgatgcgacgcaatcgtccgatccggagccgggactgtcgggcgtacacaaatcgcccgcagaagcgcggccgtctggaccgatggctgtgtagaagtactcgccgatagtggaaaccgacgccccagcactcgtccgagggcaaaggaatagatgcatcctgctttaatgagatatgcgagacgcctatgatcgcatgatatttgctttcaattctgttgtgcacgttgtaaaaaacctgagcatgtgtagctcagatccttaccgccggtttcggttcattctaatgaatatatcacccgttactatcgtatttttatgaataatattctccgttcaatttactgattgtaccctactacttatatgtacaatattaaaatgaaaacaatatattgtgctgaataggtttatagcgacatctatgatagagcgccacaataacaaacaattgcgttttattattacaaatccaattttaaaaaaagcggcagaaccggtcaaacctaaaagactgattacataaatcttattcaaatttcaaaagtgccccaggggctagtatctacgacacaccgagcggcgaactaataacgctcactgaagggaactccggttccccgccggcgcgcatgggtgagattccttgaagttgagtattggccgtccgctctaccgaaagttacgggcaccattcaacccggtccagcacggcggccgggtaaccgacttgctgccccgagaattatgcagcatttttttggtgtatgtgggccccaaatgaagtgcaggtcaaaccttgacagtgacgacaaatcgttgggcgggtccagggcgaattttgcgacaacatgtcgaggctcagcaggaccggcatgcaagctagcttactagtgatattctatagtgtcacctaaatgtattctagaccaagcatgcacagctggcgttctcagccagatccaacgttacaccacaatatatcctgccaagatctaattccggggatcggaaatccagaagcccgagaggttgccgcctttcgggctttttctttttcaaaaaaaaaaatttataaaacgatctgttgcggccggccgccgggttgtgggcaaaggcgctcgacggtgggcaaccgcttgcggttgtccacgggcggagccggtgcgcgtagcgcattgtccacaagccaagggcgaccaataattgatatatatattcataattgaaaagctaattgaacatactacttgctgtaactacttgccggagcgaggggtgtttgcaagctgttgatctgaaagggctattagcgttctcacgtgcctttttgattagcgatttcacgtgaccttattagcgatttcacgtactccgattagcgatttcacgtaccctgattagcgatttcacgtggatagtttttggagcgggccggaaagccccgtgaatcaaggctttgcggggcattagcggtttcacgtggataactaccctctatccacaggcttccggggataaaaaagcccgctcgacggcgggctgttggatggggatcgcctgaatcgccccatcatccagccagaaagtgagggagccacggttgatgagagctttgttgtaggtggaccagttggtgattttgaacttttgctttgccacggaacggtctgcgttgtcgggaagatgcgtgatctgatccttcaactcagcaaaagttcgatttattcaacaaagccacgttgtgtctcaaaatctctgatgttacattgcacaagataaaaatatatcatcatgaacaataaaactgtctgcttacataaacagtaatacaaggggtgttatgagggaagcggtgatcgccgaagtatcgactcaactatcagaggtagttggcgtcatcgagcgccatctcgaaccgacgttgctggccgtacatttgtacggctccgcagtggatggcggcctgaagccacacagtgatattgatttgctggttacggtgaccgtaaggcttgatgaaacaacgcggcgagctttgatcaacgaccttttggaaacttcggcttcccctggagagagcgagattctccgcgctgtagaagtcaccattgttgtgcacgacgacatcattccgtggcgttatccagctaagcgcgaactgcaatttggagaatggcagcgcaatgacattcttgcaggtatcttcgagccagccacgatcgacattgatctggctatcttgctgacaaaagcaagagaacatagcgttgccttggtaggtccagcggcggaggaactctttgatccggttcctgaacaggatctatttgaggcgctaaatgaaaccttaacgctatggaactcgccgcccgactgggctggcgatgagcgaaatgtagtgcttacgttgtcccgcatttggtacagcgcagtaaccggcaaaatcgcgccgaaggatgtcgctgccgactgggcaatggagcgcctgccggcccagtatcagcccgtcatacttgaagctaggcaggcttatcttggacaagaagatcgcttggcctcgcgcgcagatcagttggaagaatttgttcactacgtgaaaggcgagatcaccaaggtagtcggcaaataatcactagaccaatgttacacatatatactttagattgatttaaaacttcatttttaatttaaaaggatctaggtgaagatcctttttgataatctcatgaccaaaatcccttaacgtgagttttcgttccactgagcgtcagaccccgtagaaaagatcaaaggatcttcttgagatcctttttttctgcgcgtaatctgctgcttgcaaacaaaaaaaccaccgctaccagcggtggtttgtttgccggatcaagagctaccaactcttcttccgaaggtaactggcttcagcagagcgcagataccaaatactgttcttctagtgtagccgtagttaggccaccacttcaagaactctgtagcaccgcctacatacctcgctctgctaatcctgttaccagtggctgctgccagtggcgataagtcgtgtcttaccgggttggactcaagacgatagttaccggataaggcgcagcggtcgggctgaacggggggttcgtgcacacagcccagcttggagcgaacgacctacaccgaactgagatacctacagcgtgagctatgagaaagcgccacgcttcccgaagggagaaaggcggacaggtatccggtaagcggcagggtcggaacaggagagcgcacgagggagcttccagggggaaacgcctggtatctttatagtcctgtcgggtttcgccacctctgacttgagcgtcgatttttgtgatgctcgtcaggggggcggagcctatggaaaaacgccagcaacgcggcctttttacggttcctggccttttgctggccttttgctcacatgagatctcaaacaaacacatacagcgacttagtttacccgccaatatatcctgtcaaggctcgaactaggctcggacgaagtaagcggccgcaaccttaattaaacacggcgcgccaacagcgatcgcaccaggtacc

SEQ ID NO: 286 - DNA, 5789 bp, synthetic construct
  misc_feature 1..5789: note = pAGS-0049 EF2 promoter
  source 1..5789: mol_type = other DNA
accttccattttgacatgtttcctagctagaaggaacagctattcatatgaattttccgaggtcacgctgtgatggatcgattcgttcccgtcacagacgcaagcagcgaggtgatggctggacgggcacgcgtcacaatttagaacaacccggactcttgtgacgcgagctccgggtgcggaaaaccctacggggtgaaaggagccgcagcttccacccatttacttgactgataacccagtacacacaacgctaccgtgacggaaatgccgcgcgctgtgaagccgtggtgaatctttcgctgctgctcgttctctccacacacacaacagtattcagtcgactggtaccaacaggctatggtgagcaagggcgaggagctgttcaccggcgtggtgcccatcctggtggagctggacggcgacgtgaacggccacaagttcagcgtgagcggcgagggcgagggcgacgccacctacggcaagctgaccctgaagttcatctgcaccaccggcaagctgcccgtgccctggcccaccctggtgaccaccctgacctacggcgtgcagtgcttcagccgctaccccgaccacatgaagcagcacgacttcttcaagagcgccatgcccgagggctacgtgcaggagcgcaccatcttcttcaaggacgacggcaactacaagacccgcgccgaggtgaagttcgagggcgacaccctggtgaaccgcatcgagctgaagggcatcgacttcaaggaggacggcaacatcctgggccacaagctggagtacaactacaacagccacaacgtgtacatcatggccgacaagcagaagaacggcatcaaggtgaacttcaagatccgccacaacatcgaggacggcagcgtgcagctggccgaccactaccagcagaacacccccatcggcgacggccccgtgctgctgcccgacaaccactacctgagcacccagagcgccctgagcaaggaccccaacgagaagcgcgaccacatggtgctgctggagttcgtgaccgccgccggcatcaccctgggcatggacgagctgtacaagtcaggtggatcctagataacctttaccttcattccctgtaaattggtaccctgcaaagctttcgttcgtatcatcggtttcgacaacgttcgtcaagttcaatgcatcagtttcattgcgcacacaccagaatcctactgagtttgagtattatggcattgggaaaactgtttttcttgtaccatttgttgtgcttgtaatttactgtgttttttattcggttttcgctatcgaactgtgaaatggaaatggatggagaagagttaatgaatgatatggtccttttgttcattctcaaattaatattatttgttttttctcttatttgttgtgtgttgaatttgaaattataagagatatgcaaacattttgttttgagtaaaaatgtgtcaaatcgtggcctctaatgaccgaagttaatatgaggagtaaaacacttgtagttgtaccattatgcttattcactaggcaacaaatatattttcagacctagaaaagctgcaaatgttactgaatacaagtatgtcctcttgtgttttagacatttatgaactttcctttatgtaattttccagaatccttgtcagattctaatcattgctttataattatagttatactcatggatttgtagttgagtatgaaaatattttttaatgcattttatgacttgccaattgattgacaacatgcatcaatcgactagagaattaagggagtcacgttatgacccccgccgatgacgcgggacaagccgttttacgtttggaactgacagaaccgcaacgttgaaggagccactgagccgcgggtttctggagtttaatgagctaagcacatacgtcagaaaccattattgcgcgttcaaaagtcgcctaaggtcactatcagctagcaaatatttcttgtcaaaaatgctccactgacgttccataaattcccctcggtatccaattagagtctcatattcactctcaactcgatcgaggcatgattgaacaagatggattgcacgcaggttctccggccgcttgggtggagaggctattcggctatgactgggcacaacagacaatcggctgctctgatgccgccgtgttccggctgtcagcgcaggggcgcccggttctttttgtcaagaccgacctgtccggtgccctgaatgaactccaagacgaggcagcgcggctatcgtggctggccacgacgggcgttccttgcgcagctgtgctcgacgttgtcactgaagcgggaagggactggctgctattgggcgaagtgccggggcaggatctcctgtcatctcaccttgctcctgccgagaaagtatccatcatggctgatgcaatgcggcggctgcatacgcttgatccggctacctgcccattcgaccaccaagcgaaacatcgcatcgagcgagcacgtactcggatggaagccggtcttgtcgatcaggatgatctggacgaagagcatcaggggctcgcgccagccgaactgttcgccaggctcaaggcgcggatgcccgacggcgaggatctcgtcgtgacccacggcgatgcctgcttgccgaatatcatggtggaaaatggccgcttttctggattcatcgactgtggccggctgggtgtggcggaccgctatcaggacatagcgttggctacccgtgatattgctgaagagcttggcggcgaatgggctgaccgcttcctcgtgctttacggtatcgccgctcccgattcgcagcgcatcgccttctatcgccttcttgacgagttcttctgagcgggactctggggttcggactctagctagagtcaagcagatcgttcaaacatttggcaataaagtttcttaagattgaatcctgttgccggtcttgcgatgattatcatataatttctgttgaattacgttaagcatgtaataattaacatgtaatgcatgacgttatttatgagatgggtttttatgattagagtcccgcaattatacatttaatacgcgatagaaaacaaaatatagcgcgcaaactaggataaagtattctagaccaagcatgcacagctggcgttctcagccagatccaacgttacaccacaatatatcctgccaagatctaattccggggatcggaaatccagaagcccgagaggttgccgcctttcgggctttttctttttcaaaaaaaaaaatttataaaacgatctgttgcggccggccgccgggttgtgggcaaaggcgctcgacggtgggcaaccgcttgcggttgtccacgggcggagccggtgcgcgtagcgcattgtccacaagccaagggcgaccaataattgatatatatattcataattgaaaagctaattgaacatactacttgctgtaactacttgccggagcgaggggtgtttgcaagctgttgatctgaaagggctattagcgttctcacgtgcctttttgattagcgatttcacgtgaccttattagcgatttcacgtactccgattagcgatttcacgtaccctgattagcgatttcacgtggatagtttttggagcgggccggaaagccccgtgaatcaaggctttgcggggcattagcggtttcacgtggataactaccctctatccacaggcttccggggataaaaaagcccgctcgacggcgggctgttggatggggatcgcctgaatcgccccatcatccagccagaaagtgagggagccacggttgatgagagctttgttgtaggtggaccagttggtgattttgaacttttgctttgccacggaacggtctgcgttgtcgggaagatgcgtgatctgatccttcaactcagcaaaagttcgatttattcaacaaagccacgttgtgtctcaaaatctctgatgttacattgcacaagataaaaatatatcatcatgaacaataaaactgtctgcttacataaacagtaatacaaggggtgttatgagggaagcggtgatcgccgaagtatcgactcaactatcagaggtagttggcgtcatcgagcgccatctcgaaccgacgttgctggccgtacatttgtacggctccgcagtggatggcggcctgaagccacacagtgatattgatttgctggttacggtgaccgtaaggcttgatgaaacaacgcggcgagctttgatcaacgaccttttggaaacttcggcttcccctggagagagcgagattctccgcgctgtagaagtcaccattgttgtgcacgacgacatcattccgtggcgttatccagctaagcgcgaactgcaatttggagaatggcagcgcaatgacattcttgcaggtatcttcgagccagccacgatcgacattgatctggctatcttgctgacaaaagcaagagaacatagcgttgccttggtaggtccagcggcggaggaactctttgatccggttcctgaacaggatctatttgaggcgctaaatgaaaccttaacgctatggaactcgccgcccgactgggctggcgatgagcgaaatgtagtgcttacgttgtcccgcatttggtacagcgcagtaaccggcaaaatcgcgccgaaggatgtcgctgccgactgggcaatggagcgcctgccggcccagtatcagcccgtcatacttgaagctaggcaggcttatcttggacaagaagatcgcttggcctcgcgcgcagatcagttggaagaatttgttcactacgtgaaaggcgagatcaccaaggtagtcggcaaataatcactagaccaatgttacacatatatactttagattgatttaaaacttcatttttaatttaaaaggatctaggtgaagatcctttttgataatctcatgaccaaaatcccttaacgtgagttttcgttccactgagcgtcagaccccgtagaaaagatcaaaggatcttcttgagatcctttttttctgcgcgtaatctgctgcttgcaaacaaaaaaaccaccgctaccagcggtggtttgtttgccggatcaagagctaccaactcttcttccgaaggtaactggcttcagcagagcgcagataccaaatactgttcttctagtgtagccgtagttaggccaccacttcaagaactctgtagcaccgcctacatacctcgctctgctaatcctgttaccagtggctgctgccagtggcgataagtcgtgtcttaccgggttggactcaagacgatagttaccggataaggcgcagcggtcgggctgaacggggggttcgtgcacacagcccagcttggagcgaacgacctacaccgaactgagatacctacagcgtgagctatgagaaagcgccacgcttcccgaagggagaaaggcggacaggtatccggtaagcggcagggtcggaacaggagagcgcacgagggagcttccagggggaaacgcctggtatctttatagtcctgtcgggtttcgccacctctgacttgagcgtcgatttttgtgatgctcgtcaggggggcggagcctatggaaaaacgccagcaacgcggcctttttacggttcctggccttttgctggccttttgctcacatgagatctcaaacaaacacatacagcgacttagtttacccgccaatatatcctgtcaaggctcgaactaggctcggacgaagtaagcggccgcaaccttaattaaacacggcgcgccaacagcgatcgcaccaggtacc

SEQ ID NO: 287 - DNA, 6115 bp, synthetic construct
  misc_feature 1..6115: note = pAGS-0050 Histone 4 promoter
  source 1..6115: mol_type = other DNA
acctgcaatctcacgcaccaggcgctggaagggcaacttgcggatgagaaggtccgtggacttctggtaacgacggatctcacgcagagcgacggttccagggcgataacggtggggcttcttgactcctccggtagccggagcggacttacgggcagccttggtggcaagctgcttgcgcggcgctttgcctccggtggatttacgggcggtttgcttggttcgggccattttgacggttttttttacaagagaagagttcttgaaatttgtgaggttaaagtgtgtggcttccgccgtagtcaaggagcgtgcggttgccgatcgcaccggtacgttctgtagaaatgaacacagtgtgttgaattgaaagtatggcgcaggtatggtgtgtgataagtagcagccgcgccgagacaaacaaactttggtttctacgacaatctctgtagacaagtactagaaacccgtttgaacgagcataaatctgcaccggcaggccaccagacatcgtttcaacgtaatattctacgtaaccattttatcccaggaaacctacggcctgtgaaccactgaaaggaagcactcacaattcgctctcggcaacaaccgacaatagtcttactcacagtcaataccgaaaacaaacaacagaacagtattcagtcgactggtaccaacaggctatggtgagcaagggcgaggagctgttcaccggcgtggtgcccatcctggtggagctggacggcgacgtgaacggccacaagttcagcgtgagcggcgagggcgagggcgacgccacctacggcaagctgaccctgaagttcatctgcaccaccggcaagctgcccgtgccctggcccaccctggtgaccaccctgacctacggcgtgcagtgcttcagccgctaccccgaccacatgaagcagcacgacttcttcaagagcgccatgcccgagggctacgtgcaggagcgcaccatcttcttcaaggacgacggcaactacaagacccgcgccgaggtgaagttcgagggcgacaccctggtgaaccgcatcgagctgaagggcatcgacttcaaggaggacggcaacatcctgggccacaagctggagtacaactacaacagccacaacgtgtacatcatggccgacaagcagaagaacggcatcaaggtgaacttcaagatccgccacaacatcgaggacggcagcgtgcagctggccgaccactaccagcagaacacccccatcggcgacggccccgtgctgctgcccgacaaccactacctgagcacccagagcgccctgagcaaggaccccaacgagaagcgcgaccacatggtgctgctggagttcgtgaccgccgccggcatcaccctgggcatggacgagctgtacaagtcaggtggatcctagataacctttaccttcattccctgtaaattggtaccctgcaaagctttcgttcgtatcatcggtttcgacaacgttcgtcaagttcaatgcatcagtttcattgcgcacacaccagaatcctactgagtttgagtattatggcattgggaaaactgtttttcttgtaccatttgttgtgcttgtaatttactgtgttttttattcggttttcgctatcgaactgtgaaatggaaatggatggagaagagttaatgaatgatatggtccttttgttcattctcaaattaatattatttgttttttctcttatttgttgtgtgttgaatttgaaattataagagatatgcaaacattttgttttgagtaaaaatgtgtcaaatcgtggcctctaatgaccgaagttaatatgaggagtaaaacacttgtagttgtaccattatgcttattcactaggcaacaaatatattttcagacctagaaaagctgcaaatgttactgaatacaagtatgtcctcttgtgttttagacatttatgaactttcctttatgtaattttccagaatccttgtcagattctaatcattgctttataattatagttatactcatggatttgtagttgagtatgaaaatattttttaatgcattttatgacttgccaattgattgacaacatgcatcaatcgactagagaattaagggagtcacgttatgacccccgccgatgacgcgggacaagccgttttacgtttggaactgacagaaccgcaacgttgaaggagccactgagccgcgggtttctggagtttaatgagctaagcacatacgtcagaaaccattattgcgcgttcaaaagtcgcctaaggtcactatcagctagcaaatatttcttgtcaaaaatgctccactgacgttccataaattcccctcggtatccaattagagtctcatattcactctcaactcgatcgaggcatgattgaacaagatggattgcacgcaggttctccggccgcttgggtggagaggctattcggctatgactgggcacaacagacaatcggctgctctgatgccgccgtgttccggctgtcagcgcaggggcgcccggttctttttgtcaagaccgacctgtccggtgccctgaatgaactccaagacgaggcagcgcggctatcgtggctggccacgacgggcgttccttgcgcagctgtgctcgacgttgtcactgaagcgggaagggactggctgctattgggcgaagtgccggggcaggatctcctgtcatctcaccttgctcctgccgagaaagtatccatcatggctgatgcaatgcggcggctgcatacgcttgatccggctacctgcccattcgaccaccaagcgaaacatcgcatcgagcgagcacgtactcggatggaagccggtcttgtcgatcaggatgatctggacgaagagcatcaggggctcgcgccagccgaactgttcgccaggctcaaggcgcggatgcccgacggcgaggatctcgtcgtgacccacggcgatgcctgcttgccgaatatcatggtggaaaatggccgcttttctggattcatcgactgtggccggctgggtgtggcggaccgctatcaggacatagcgttggctacccgtgatattgctgaagagcttggcggcgaatgggctgaccgcttcctcgtgctttacggtatcgccgctcccgattcgcagcgcatcgccttctatcgccttcttgacgagttcttctgagcgggactctggggttcggactctagctagagtcaagcagatcgttcaaacatttggcaataaagtttcttaagattgaatcctgttgccggtcttgcgatgattatcatataatttctgttgaattacgttaagcatgtaataattaacatgtaatgcatgacgttatttatgagatgggtttttatgattagagtcccgcaattatacatttaatacgcgatagaaaacaaaatatagcgcgcaaactaggataaagtattctagaccaagcatgcacagctggcgttctcagccagatccaacgttacaccacaatatatcctgccaagatctaattccggggatcggaaatccagaagcccgagaggttgccgcctttcgggctttttctttttcaaaaaaaaaaatttataaaacgatctgttgcggccggccgccgggttgtgggcaaaggcgctcgacggtgggcaaccgcttgcggttgtccacgggcggagccggtgcgcgtagcgcattgtccacaagccaagggcgaccaataattgatatatatattcataattgaaaagctaattgaacatactacttgctgtaactacttgccggagcgaggggtgtttgcaagctgttgatctgaaagggctattagcgttctcacgtgcctttttgattagcgatttcacgtgaccttattagcgatttcacgtactccgattagcgatttcacgtaccctgattagcgatttcacgtggatagtttttggagcgggccggaaagccccgtgaatcaaggctttgcggggcattagcggtttcacgtggataactaccctctatccacaggcttccggggataaaaaagcccgctcgacggcgggctgttggatggggatcgcctgaatcgccccatcatccagccagaaagtgagggagccacggttgatgagagctttgttgtaggtggaccagttggtgattttgaacttttgctttgccacggaacggtctgcgttgtcgggaagatgcgtgatctgatccttcaactcagcaaaagttcgatttattcaacaaagccacgttgtgtctcaaaatctctgatgttacattgcacaagataaaaatatatcatcatgaacaataaaactgtctgcttacataaacagtaatacaaggggtgttatgagggaagcggtgatcgccgaagtatcgactcaactatcagaggtagttggcgtcatcgagcgccatctcgaaccgacgttgctggccgtacatttgtacggctccgcagtggatggcggcctgaagccacacagtgatattgatttgctggttacggtgaccgtaaggcttgatgaaacaacgcggcgagctttgatcaacgaccttttggaaacttcggcttcccctggagagagcgagattctccgcgctgtagaagtcaccattgttgtgcacgacgacatcattccgtggcgttatccagctaagcgcgaactgcaatttggagaatggcagcgcaatgacattcttgcaggtatcttcgagccagccacgatcgacattgatctggctatcttgctgacaaaagcaagagaacatagcgttgccttggtaggtccagcggcggaggaactctttgatccggttcctgaacaggatctatttgaggcgctaaatgaaaccttaacgctatggaactcgccgcccgactgggctggcgatgagcgaaatgtagtgcttacgttgtcccgcatttggtacagcgcagtaaccggcaaaatcgcgccgaaggatgtcgctgccgactgggcaatggagcgcctgccggcccagtatcagcccgtcatacttgaagctaggcaggcttatcttggacaagaagatcgcttggcctcgcgcgcagatcagttggaagaatttgttcactacgtgaaaggcgagatcaccaaggtagtcggcaaataatcactagaccaatgttacacatatatactttagattgatttaaaacttcatttttaatttaaaaggatctaggtgaagatcctttttgataatctcatgaccaaaatcccttaacgtgagttttcgttccactgagcgtcagaccccgtagaaaagatcaaaggatcttcttgagatcctttttttctgcgcgtaatctgctgcttgcaaacaaaaaaaccaccgctaccagcggtggtttgtttgccggatcaagagctaccaactcttcttccgaaggtaactggcttcagcagagcgcagataccaaatactgttcttctagtgtagccgtagttaggccaccacttcaagaactctgtagcaccgcctacatacctcgctctgctaatcctgttaccagtggctgctgccagtggcgataagtcgtgtcttaccgggttggactcaagacgatagttaccggataaggcgcagcggtcgggctgaacggggggttcgtgcacacagcccagcttggagcgaacgacctacaccgaactgagatacctacagcgtgagctatgagaaagcgccacgcttcccgaagggagaaaggcggacaggtatccggtaagcggcagggtcggaacaggagagcgcacgagggagcttccagggggaaacgcctggtatctttatagtcctgtcgggtttcgccacctctgacttgagcgtcgatttttgtgatgctcgtcaggggggcggagcctatggaaaaacgccagcaacgcggcctttttacggttcctggccttttgctggccttttgctcacatgagatctcaaacaaacacatacagcgacttagtttacccgccaatatatcctgtcaaggctcgaactaggctcggacgaagtaagcggccgcaaccttaattaaacacggcgcgccaacagcgatcgcaccaggtacc

SEQ ID NO: 288 - DNA, 5605 bp, synthetic construct
  misc_feature 1..5605: note = pAGS-0051 Lhcf.1 promoter
  source 1..5605: mol_type = other DNA
acctgctgcaggacgcaatggaggattatcaccgcaaaaatgaacttcgaaaaaaactttcgagcgaccatggaaaaggaggatcagattcagattacaacagtggattgctctggtagcaaatatcttctgctagattggctcaacagtattcagtcgactggtaccaacaggctatggtgagcaagggcgaggagctgttcaccggcgtggtgcccatcctggtggagctggacggcgacgtgaacggccacaagttcagcgtgagcggcgagggcgagggcgacgccacctacggcaagctgaccctgaagttcatctgcaccaccggcaagctgcccgtgccctggcccaccctggtgaccaccctgacctacggcgtgcagtgcttcagccgctaccccgaccacatgaagcagcacgacttcttcaagagcgccatgcccgagggctacgtgcaggagcgcaccatcttcttcaaggacgacggcaactacaagacccgcgccgaggtgaagttcgagggcgacaccctggtgaaccgcatcgagctgaagggcatcgacttcaaggaggacggcaacatcctgggccacaagctggagtacaactacaacagccacaacgtgtacatcatggccgacaagcagaagaacggcatcaaggtgaacttcaagatccgccacaacatcgaggacggcagcgtgcagctggccgaccactaccagcagaacacccccatcggcgacggccccgtgctgctgcccgacaaccactacctgagcacccagagcgccctgagcaaggaccccaacgagaagcgcgaccacatggtgctgctggagttcgtgaccgccgccggcatcaccctgggcatggacgagctgtacaagtcaggtggatcctagataacctttaccttcattccctgtaaattggtaccctgcaaagctttcgttcgtatcatcggtttcgacaacgttcgtcaagttcaatgcatcagtttcattgcgcacacaccagaatcctactgagtttgagtattatggcattgggaaaactgtttttcttgtaccatttgttgtgcttgtaatttactgtgttttttattcggttttcgctatcgaactgtgaaatggaaatggatggagaagagttaatgaatgatatggtccttttgttcattctcaaattaatattatttgttttttctcttatttgttgtgtgttgaatttgaaattataagagatatgcaaacattttgttttgagtaaaaatgtgtcaaatcgtggcctctaatgaccgaagttaatatgaggagtaaaacacttgtagttgtaccattatgcttattcactaggcaacaaatatattttcagacctagaaaagctgcaaatgttactgaatacaagtatgtcctcttgtgttttagacatttatgaactttcctttatgtaattttccagaatccttgtcagattctaatcattgctttataattatagttatactcatggatttgtagttgagtatgaaaatattttttaatgcattttatgacttgccaattgattgacaacatgcatcaatcgactagagaattaagggagtcacgttatgacccccgccgatgacgcgggacaagccgttttacgtttggaactgacagaaccgcaacgttgaaggagccactgagccgcgggtttctggagtttaatgagctaagcacatacgtcagaaaccattattgcgcgttcaaaagtcgcctaaggtcactatcagctagcaaatatttcttgtcaaaaatgctccactgacgttccataaattcccctcggtatccaattagagtctcatattcactctcaactcgatcgaggcatgattgaacaagatggattgcacgcaggttctccggccgcttgggtggagaggctattcggctatgactgggcacaacagacaatcggctgctctgatgccgccgtgttccggctgtcagcgcaggggcgcccggttctttttgtcaagaccgacctgtccggtgccctgaatgaactccaagacgaggcagcgcggctatcgtggctggccacgacgggcgttccttgcgcagctgtgctcgacgttgtcactgaagcgggaagggactggctgctattgggcgaagtgccggggcaggatctcctgtcatctcaccttgctcctgccgagaaagtatccatcatggctgatgcaatgcggcggctgcatacgcttgatccggctacctgcccattcgaccaccaagcgaaacatcgcatcgagcgagcacgtactcggatggaagccggtcttgtcgatcaggatgatctggacgaagagcatcaggggctcgcgccagccgaactgttcgccaggctcaaggcgcggatgcccgacggcgaggatctcgtcgtgacccacggcgatgcctgcttgccgaatatcatggtggaaaatggccgcttttctggattcatcgactgtggccggctgggtgtggcggaccgctatcaggacatagcgttggctacccgtgatattgctgaagagcttggcggcgaatgggctgaccgcttcctcgtgctttacggtatcgccgctcccgattcgcagcgcatcgccttctatcgccttcttgacgagttcttctgagcgggactctggggttcggactctagctagagtcaagcagatcgttcaaacatttggcaataaagtttcttaagattgaatcctgttgccggtcttgcgatgattatcatataatttctgttgaattacgttaagcatgtaataattaacatgtaatgcatgacgttatttatgagatgggtttttatgattagagtcccgcaattatacatttaatacgcgatagaaaacaaaatatagcgcgcaaactaggataaagtattctagaccaagcatgcacagctggcgttctcagccagatccaacgttacaccacaatatatcctgccaagatctaattccggggatcggaaatccagaagcccgagaggttgccgcctttcgggctttttctttttcaaaaaaaaaaatttataaaacgatctgttgcggccggccgccgggttgtgggcaaaggcgctcgacggtgggcaaccgcttgcggttgtccacgggcggagccggtgcgcgtagcgcattgtccacaagccaagggcgaccaataattgatatatatattcataattgaaaagctaattgaacatactacttgctgtaactacttgccggagcgaggggtgtttgcaagctgttgatctgaaagggctattagcgttctcacgtgcctttttgattagcgatttcacgtgaccttattagcgatttcacgtactccgattagcgatttcacgtaccctgattagcgatttcacgtggatagtttttggagcgggccggaaagccccgtgaatcaaggctttgcggggcattagcggtttcacgtggataactaccctctatccacaggcttccggggataaaaaagcccgctcgacggcgggctgttggatggggatcgcctgaatcgccccatcatccagccagaaagtgagggagccacggttgatgagagctttgttgtaggtggaccagttggtgattttgaacttttgctttgccacggaacggtctgcgttgtcgggaagatgcgtgatctgatccttcaactcagcaaaagttcgatttattcaacaaagccacgttgtgtctcaaaatctctgatgttacattgcacaagataaaaatatatcatcatgaacaataaaactgtctgcttacataaacagtaatacaaggggtgttatgagggaagcggtgatcgccgaagtatcgactcaactatcagaggtagttggcgtcatcgagcgccatctcgaaccgacgttgctggccgtacatttgtacggctccgcagtggatggcggcctgaagccacacagtgatattgatttgctggttacggtgaccgtaaggcttgatgaaacaacgcggcgagctttgatcaacgaccttttggaaacttcggcttcccctggagagagcgagattctccgcgctgtagaagtcaccattgttgtgcacgacgacatcattccgtggcgttatccagctaagcgcgaactgcaatttggagaatggcagcgcaatgacattcttgcaggtatcttcgagccagccacgatcgacattgatctggctatcttgctgacaaaagcaagagaacatagcgttgccttggtaggtccagcggcggaggaactctttgatccggttcctgaacaggatctatttgaggcgctaaatgaaaccttaacgctatggaactcgccgcccgactgggctggcgatgagcgaaatgtagtgcttacgttgtcccgcatttggtacagcgcagtaaccggcaaaatcgcgccgaaggatgtcgctgccgactgggcaatggagcgcctgccggcccagtatcagcccgtcatacttgaagctaggcaggcttatcttggacaagaagatcgcttggcctcgcgcgcagatcagttggaagaatttgttcactacgtgaaaggcgagatcaccaaggtagtcggcaaataatcactagaccaatgttacacatatatactttagattgatttaaaacttcatttttaatttaaaaggatctaggtgaagatcctttttgataatctcatgaccaaaatcccttaacgtgagttttcgttccactgagcgtcagaccccgtagaaaagatcaaaggatcttcttgagatcctttttttctgcgcgtaatctgctgcttgcaaacaaaaaaaccaccgctaccagcggtggtttgtttgccggatcaagagctaccaactcttcttccgaaggtaactggcttcagcagagcgcagataccaaatactgttcttctagtgtagccgtagttaggccaccacttcaagaactctgtagcaccgcctacatacctcgctctgctaatcctgttaccagtggctgctgccagtggcgataagtcgtgtcttaccgggttggactcaagacgatagttaccggataaggcgcagcggtcgggctgaacggggggttcgtgcacacagcccagcttggagcgaacgacctacaccgaactgagatacctacagcgtgagctatgagaaagcgccacgcttcccgaagggagaaaggcggacaggtatccggtaagcggcagggtcggaacaggagagcgcacgagggagcttccagggggaaacgcctggtatctttatagtcctgtcgggtttcgccacctctgacttgagcgtcgatttttgtgatgctcgtcaggggggcggagcctatggaaaaacgccagcaacgcggcctttttacggttcctggccttttgctggccttttgctcacatgagatctcaaacaaacacatacagcgacttagtttacccgccaatatatcctgtcaaggctcgaactaggctcggacgaagtaagcggccgcaaccttaattaaacacggcgcgccaacagcgatcgcaccaggtacc

SEQ ID NO: 289 - DNA, 5728 bp, synthetic construct
  misc_feature 1..5728: note = pAGS-0052 Ubi.U4 promoter
  source 1..5728: mol_type = other DNA
acctactacgttagagcgctaacgagaatacttcatataccgtattttttacgataataataatgtaatgtgaaattgctatccaaaaggcacctaattttgtccaccgttcaaaggaaaggacaaggaagtagtagcgtgtaggtttggtgctgtacaaaataagcaagacacgtgttgccttattataggataatccataaggcaatttcgtcttaagtcggccattgcacctttaaaaggagcctctttgttcccaaaatcttcaacagtattcagtcgactggtaccaacaggctatggtgagcaagggcgaggagctgttcaccggcgtggtgcccatcctggtggagctggacggcgacgtgaacggccacaagttcagcgtgagcggcgagggcgagggcgacgccacctacggcaagctgaccctgaagttcatctgcaccaccggcaagctgcccgtgccctggcccaccctggtgaccaccctgacctacggcgtgcagtgcttcagccgctaccccgaccacatgaagcagcacgacttcttcaagagcgccatgcccgagggctacgtgcaggagcgcaccatcttcttcaaggacgacggcaactacaagacccgcgccgaggtgaagttcgagggcgacaccctggtgaaccgcatcgagctgaagggcatcgacttcaaggaggacggcaacatcctgggccacaagctggagtacaactacaacagccacaacgtgtacatcatggccgacaagcagaagaacggcatcaaggtgaacttcaagatccgccacaacatcgaggacggcagcgtgcagctggccgaccactaccagcagaacacccccatcggcgacggccccgtgctgctgcccgacaaccactacctgagcacccagagcgccctgagcaaggaccccaacgagaagcgcgaccacatggtgctgctggagttcgtgaccgccgccggcatcaccctgggcatggacgagctgtacaagtcaggtggatcctagataacctttaccttcattccctgtaaattggtaccctgcaaagctttcgttcgtatcatcggtttcgacaacgttcgtcaagttcaatgcatcagtttcattgcgcacacaccagaatcctactgagtttgagtattatggcattgggaaaactgtttttcttgtaccatttgttgtgcttgtaatttactgtgttttttattcggttttcgctatcgaactgtgaaatggaaatggatggagaagagttaatgaatgatatggtccttttgttcattctcaaattaatattatttgttttttctcttatttgttgtgtgttgaatttgaaattataagagatatgcaaacattttgttttgagtaaaaatgtgtcaaatcgtggcctctaatgaccgaagttaatatgaggagtaaaacacttgtagttgtaccattatgcttattcactaggcaacaaatatattttcagacctagaaaagctgcaaatgttactgaatacaagtatgtcctcttgtgttttagacatttatgaactttcctttatgtaattttccagaatccttgtcagattctaatcattgctttataattatagttatactcatggatttgtagttgagtatgaaaatattttttaatgcattttatgacttgccaattgattgacaacatgcatcaatcgactagagaattaagggagtcacgttatgacccccgccgatgacgcgggacaagccgttttacgtttggaactgacagaaccgcaacgttgaaggagccactgagccgcgggtttctggagtttaatgagctaagcacatacgtcagaaaccattattgcgcgttcaaaagtcgcctaaggtcactatcagctagcaaatatttcttgtcaaaaatgctccactgacgttccataaattcccctcggtatccaattagagtctcatattcactctcaactcgatcgaggcatgattgaacaagatggattgcacgcaggttctccggccgcttgggtggagaggctattcggctatgactgggcacaacagacaatcggctgctctgatgccgccgtgttccggctgtcagcgcaggggcgcccggttctttttgtcaagaccgacctgtccggtgccctgaatgaactccaagacgaggcagcgcggctatcgtggctggccacgacgggcgttccttgcgcagctgtgctcgacgttgtcactgaagcgggaagggactggctgctattgggcgaagtgccggggcaggatctcctgtcatctcaccttgctcctgccgagaaagtatccatcatggctgatgcaatgcggcggctgcatacgcttgatccggctacctgcccattcgaccaccaagcgaaacatcgcatcgagcgagcacgtactcggatggaagccggtcttgtcgatcaggatgatctggacgaagagcatcaggggctcgcgccagccgaactgttcgccaggctcaaggcgcggatgcccgacggcgaggatctcgtcgtgacccacggcgatgcctgcttgccgaatatcatggtggaaaatggccgcttttctggattcatcgactgtggccggctgggtgtggcggaccgctatcaggacatagcgttggctacccgtgatattgctgaagagcttggcggcgaatgggctgaccgcttcctcgtgctttacggtatcgccgctcccgattcgcagcgcatcgccttctatcgccttcttgacgagttcttctgagcgggactctggggttcggactctagctagagtcaagcagatcgttcaaacatttggcaataaagtttcttaagattgaatcctgttgccggtcttgcgatgattatcatataatttctgttgaattacgttaagcatgtaataattaacatgtaatgcatgacgttatttatgagatgggtttttatgattagagtcccgcaattatacatttaatacgcgatagaaaacaaaatatagcgcgcaaactaggataaagtattctagaccaagcatgcacagctggcgttctcagccagatccaacgttacaccacaatatatcctgccaagatctaattccggggatcggaaatccagaagcccgagaggttgccgcctttcgggctttttctttttcaaaaaaaaaaatttataaaacgatctgttgcggccggccgccgggttgtgggcaaaggcgctcgacggtgggcaaccgcttgcggttgtccacgggcggagccggtgcgcgtagcgcattgtccacaagccaagggcgaccaataattgatatatatattcataattgaaaagctaattgaacatactacttgctgtaactacttgccggagcgaggggtgtttgcaagctgttgatctgaaagggctattagcgttctcacgtgcctttttgattagcgatttcacgtgaccttattagcgatttcacgtactccgattagcgatttcacgtaccctgattagcgatttcacgtggatagtttttggagcgggccggaaagccccgtgaatcaaggctttgcggggcattagcggtttcacgtggataactaccctctatccacaggcttccggggataaaaaagcccgctcgacggcgggctgttggatggggatcgcctgaatcgccccatcatccagccagaaagtgagggagccacggttgatgagagctttgttgtaggtggaccagttggtgattttgaacttttgctttgccacggaacggtctgcgttgtcgggaagatgcgtgatctgatccttcaactcagcaaaagttcgatttattcaacaaagccacgttgtgtctcaaaatctctgatgttacattgcacaagataaaaatatatcatcatgaacaataaaactgtctgcttacataaacagtaatacaaggggtgttatgagggaagcggtgatcgccgaagtatcgactcaactatcagaggtagttggcgtcatcgagcgccatctcgaaccgacgttgctggccgtacatttgtacggctccgcagtggatggcggcctgaagccacacagtgatattgatttgctggttacggtgaccgtaaggcttgatgaaacaacgcggcgagctttgatcaacgaccttttggaaacttcggcttcccctggagagagcgagattctccgcgctgtagaagtcaccattgttgtgcacgacgacatcattccgtggcgttatccagctaagcgcgaactgcaatttggagaatggcagcgcaatgacattcttgcaggtatcttcgagccagccacgatcgacattgatctggctatcttgctgacaaaagcaagagaacatagcgttgccttggtaggtccagcggcggaggaactctttgatccggttcctgaacaggatctatttgaggcgctaaatgaaaccttaacgctatggaactcgccgcccgactgggctggcgatgagcgaaatgtagtgcttacgttgtcccgcatttggtacagcgcagtaaccggcaaaatcgcgccgaaggatgtcgctgccgactgggcaatggagcgcctgccggcccagtatcagcccgtcatacttgaagctaggcaggcttatcttggacaagaagatcgcttggcctcgcgcgcagatcagttggaagaatttgttcactacgtgaaaggcgagatcaccaaggtagtcggcaaataatcactagaccaatgttacacatatatactttagattgatttaaaacttcatttttaatttaaaaggatctaggtgaagatcctttttgataatctcatgaccaaaatcccttaacgtgagttttcgttccactgagcgtcagaccccgtagaaaagatcaaaggatcttcttgagatcctttttttctgcgcgtaatctgctgcttgcaaacaaaaaaaccaccgctaccagcggtggtttgtttgccggatcaagagctaccaactcttcttccgaaggtaactggcttcagcagagcgcagataccaaatactgttcttctagtgtagccgtagttaggccaccacttcaagaactctgtagcaccgcctacatacctcgctctgctaatcctgttaccagtggctgctgccagtggcgataagtcgtgtcttaccgggttggactcaagacgatagttaccggataaggcgcagcggtcgggctgaacggggggttcgtgcacacagcccagcttggagcgaacgacctacaccgaactgagatacctacagcgtgagctatgagaaagcgccacgcttcccgaagggagaaaggcggacaggtatccggtaagcggcagggtcggaacaggagagcgcacgagggagcttccagggggaaacgcctggtatctttatagtcctgtcgggtttcgccacctctgacttgagcgtcgatttttgtgatgctcgtcaggggggcggagcctatggaaaaacgccagcaacgcggcctttttacggttcctggccttttgctggccttttgctcacatgagatctcaaacaaacacatacagcgacttagtttacccgccaatatatcctgtcaaggctcgaactaggctcggacgaagtaagcggccgcaaccttaattaaacacggcgcgccaacagcgatcgcaccaggtacc

SEQ ID NO: 290 - DNA, 5863 bp, synthetic construct
  misc_feature 1..5863: note = pAGS-0053 CAM 35S promoter
  source 1..5863: mol_type = other DNA
acctcctactccaaaaatgtcaaagatacagtctcagaagaccaaagggctattgagacttttcaacaaagggtaatatcgggaaacctcctcggattccattgcccagctatctgtcacttcatcaaaaggacagtagaaaaggaaggtggcacctacaaatgccatcattgcgataaaggaaaggctatcgttcaagatgcccctgccgacagtggtcccaaagatggacccccacccacgaggagcatcgtggaaaaagaagacgttccaaccacgtcttcaaagcaagtggattgatgtgatatctccactgacgtaagggatgacgcacaatcccactatccttcgcaagacccttcctctatataaggaagttcatttcatttggagaggacagccaacagtattcagtcgactggtaccaacaggctatggtgagcaagggcgaggagctgttcaccggcgtggtgcccatcctggtggagctggacggcgacgtgaacggccacaagttcagcgtgagcggcgagggcgagggcgacgccacctacggcaagctgaccctgaagttcatctgcaccaccggcaagctgcccgtgccctggcccaccctggtgaccaccctgacctacggcgtgcagtgcttcagccgctaccccgaccacatgaagcagcacgacttcttcaagagcgccatgcccgagggctacgtgcaggagcgcaccatcttcttcaaggacgacggcaactacaagacccgcgccgaggtgaagttcgagggcgacaccctggtgaaccgcatcgagctgaagggcatcgacttcaaggaggacggcaacatcctgggccacaagctggagtacaactacaacagccacaacgtgtacatcatggccgacaagcagaagaacggcatcaaggtgaacttcaagatccgccacaacatcgaggacggcagcgtgcagctggccgaccactaccagcagaacacccccatcggcgacggccccgtgctgctgcccgacaaccactacctgagcacccagagcgccctgagcaaggaccccaacgagaagcgcgaccacatggtgctgctggagttcgtgaccgccgccggcatcaccctgggcatggacgagctgtacaagtcaggtggatcctagataacctttaccttcattccctgtaaattggtaccctgcaaagctttcgttcgtatcatcggtttcgacaacgttcgtcaagttcaatgcatcagtttcattgcgcacacaccagaatcctactgagtttgagtattatggcattgggaaaactgtttttcttgtaccatttgttgtgcttgtaatttactgtgttttttattcggttttcgctatcgaactgtgaaatggaaatggatggagaagagttaatgaatgatatggtccttttgttcattctcaaattaatattatttgttttttctcttatttgttgtgtgttgaatttgaaattataagagatatgcaaacattttgttttgagtaaaaatgtgtcaaatcgtggcctctaatgaccgaagttaatatgaggagtaaaacacttgtagttgtaccattatgcttattcactaggcaacaaatatattttcagacctagaaaagctgcaaatgttactgaatacaagtatgtcctcttgtgttttagacatttatgaactttcctttatgtaattttccagaatccttgtcagattctaatcattgctttataattatagttatactcatggatttgtagttgagtatgaaaatattttttaatgcattttatgacttgccaattgattgacaacatgcatcaatcgactagagaattaagggagtcacgttatgacccccgccgatgacgcgggacaagccgttttacgtttggaactgacagaaccgcaacgttgaaggagccactgagccgcgggtttctggagtttaatgagctaagcacatacgtcagaaaccattattgcgcgttcaaaagtcgcctaaggtcactatcagctagcaaatatttcttgtcaaaaatgctccactgacgttccataaattcccctcggtatccaattagagtctcatattcactctcaactcgatcgaggcatgattgaacaagatggattgcacgcaggttctccggccgcttgggtggagaggctattcggctatgactgggcacaacagacaatcggctgctctgatgccgccgtgttccggctgtcagcgcaggggcgcccggttctttttgtcaagaccgacctgtccggtgccctgaatgaactccaagacgaggcagcgcggctatcgtggctggccacgacgggcgttccttgcgcagctgtgctcgacgttgtcactgaagcgggaagggactggctgctattgggcgaagtgccggggcaggatctcctgtcatctcaccttgctcctgccgagaaagtatccatcatggctgatgcaatgcggcggctgcatacgcttgatccggctacctgcccattcgaccaccaagcgaaacatcgcatcgagcgagcacgtactcggatggaagccggtcttgtcgatcaggatgatctggacgaagagcatcaggggctcgcgccagccgaactgttcgccaggctcaaggcgcggatgcccgacggcgaggatctcgtcgtgacccacggcgatgcctgcttgccgaatatcatggtggaaaatggccgcttttctggattcatcgactgtggccggctgggtgtggcggaccgctatcaggacatagcgttggctacccgtgatattgctgaagagcttggcggcgaatgggctgaccgcttcctcgtgctttacggtatcgccgctcccgattcgcagcgcatcgccttctatcgccttcttgacgagttcttctgagcgggactctggggttcggactctagctagagtcaagcagatcgttcaaacatttggcaataaagtttcttaagattgaatcctgttgccggtcttgcgatgattatcatataatttctgttgaattacgttaagcatgtaataattaacatgtaatgcatgacgttatttatgagatgggtttttatgattagagtcccgcaattatacatttaatacgcgatagaaaacaaaatatagcgcgcaaactaggataaagtattctagaccaagcatgcacagctggcgttctcagccagatccaacgttacaccacaatatatcctgccaagatctaattccggggatcggaaatccagaagcccgagaggttgccgcctttcgggctttttctttttcaaaaaaaaaaatttataaaacgatctgttgcggccggccgccgggttgtgggcaaaggcgctcgacggtgggcaaccgcttgcggttgtccacgggcggagccggtgcgcgtagcgcattgtccacaagccaagggcgaccaataattgatatatatattcataattgaaaagctaattgaacatactacttgctgtaactacttgccggagcgaggggtgtttgcaagctgttgatctgaaagggctattagcgttctcacgtgcctttttgattagcgatttcacgtgaccttattagcgatttcacgtactccgattagcgatttcacgtaccctgattagcgatttcacgtggatagtttttggagcgggccggaaagccccgtgaatcaaggctttgcggggcattagcggtttcacgtggataactaccctctatccacaggcttccggggataaaaaagcccgctcgacggcgggctgttggatggggatcgcctgaatcgccccatcatccagccagaaagtgagggagccacggttgatgagagctttgttgtaggtggaccagttggtgattttgaacttttgctttgccacggaacggtctgcgttgtcgggaagatgcgtgatctgatccttcaactcagcaaaagttcgatttattcaacaaagccacgttgtgtctcaaaatctctgatgttacattgcacaagataaaaatatatcatcatgaacaataaaactgtctgcttacataaacagtaatacaaggggtgttatgagggaagcggtgatcgccgaagtatcgactcaactatcagaggtagttggcgtcatcgagcgccatctcgaaccgacgttgctggccgtacatttgtacggctccgcagtggatggcggcctgaagccacacagtgatattgatttgctggttacggtgaccgtaaggcttgatgaaacaacgcggcgagctttgatcaacgaccttttggaaacttcggcttcccctggagagagcgagattctccgcgctgtagaagtcaccattgttgtgcacgacgacatcattccgtggcgttatccagctaagcgcgaactgcaatttggagaatggcagcgcaatgacattcttgcaggtatcttcgagccagccacgatcgacattgatctggctatcttgctgacaaaagcaagagaacatagcgttgccttggtaggtccagcggcggaggaactctttgatccggttcctgaacaggatctatttgaggcgctaaatgaaaccttaacgctatggaactcgccgcccgactgggctggcgatgagcgaaatgtagtgcttacgttgtcccgcatttggtacagcgcagtaaccggcaaaatcgcgccgaaggatgtcgctgccgactgggcaatggagcgcctgccggcccagtatcagcccgtcatacttgaagctaggcaggcttatcttggacaagaagatcgcttggcctcgcgcgcagatcagttggaagaatttgttcactacgtgaaaggcgagatcaccaaggtagtcggcaaataatcactagaccaatgttacacatatatactttagattgatttaaaacttcatttttaatttaaaaggatctaggtgaagatcctttttgataatctcatgaccaaaatcccttaacgtgagttttcgttccactgagcgtcagaccccgtagaaaagatcaaaggatcttcttgagatcctttttttctgcgcgtaatctgctgcttgcaaacaaaaaaaccaccgctaccagcggtggtttgtttgccggatcaagagctaccaactcttcttccgaaggtaactggcttcagcagagcgcagataccaaatactgttcttctagtgtagccgtagttaggccaccacttcaagaactctgtagcaccgcctacatacctcgctctgctaatcctgttaccagtggctgctgccagtggcgataagtcgtgtcttaccgggttggactcaagacgatagttaccggataaggcgcagcggtcgggctgaacggggggttcgtgcacacagcccagcttggagcgaacgacctacaccgaactgagatacctacagcgtgagctatgagaaagcgccacgcttcccgaagggagaaaggcggacaggtatccggtaagcggcagggtcggaacaggagagcgcacgagggagcttccagggggaaacgcctggtatctttatagtcctgtcgggtttcgccacctctgacttgagcgtcgatttttgtgatgctcgtcaggggggcggagcctatggaaaaacgccagcaacgcggcctttttacggttcctggccttttgctggccttttgctcacatgagatctcaaacaaacacatacagcgacttagtttacccgccaatatatcctgtcaaggctcgaactaggctcggacgaagtaagcggccgcaaccttaattaaacacggcgcgccaacagcgatcgcaccaggtacc

SEQ ID NO: 291 - DNA, 5863 bp, synthetic construct; identical to SEQ ID NO: 290
  misc_feature 1..5863: note = pAGS-0054 MAS promoter
  source 1..5863: mol_type = other DNA

SEQ ID NO: 292 - DNA, 5958 bp, synthetic construct
  misc_feature 1..5958: note = pAGS-0055 PAR promoter
  source 1..5958: mol_type = other DNA
acctgctgaggcttgacatgattggtgcgtatgtttgtatgaagctacaggactgatttggcgggctatgagggcgggggaagctctggaagggccgcgatggggcgcgcggcgtccagaaggcgccatacggcccgctggcggcacccatccggtataaaagcccgcgaccccgaacggtgacctccactttcagcgacaaacgagcacttatacatacgcgactattctgccgctatacataaccactcagctagcttaagatcccatcaagcttgcatgccgggcgcgccagaaggagcgcagccaaaccaggatgatgtttgatggggtatttgagcacttgcaacccttatccggaagccccctggcccacaaaggctaggcgccaatgcaagcagttcgcatgcagcccctggagcggtgccctcctgataaaccggccagggggcctatgttctttacttttttacaagagaagtcactcaacatcttaaaacagtattcagtcgactggtaccaacaggctatggtgagcaagggcgaggagctgttcaccggcgtggtgcccatcctggtggagctggacggcgacgtgaacggccacaagttcagcgtgagcggcgagggcgagggcgacgccacctacggcaagctgaccctgaagttcatctgcaccaccggcaagctgcccgtgccctggcccaccctggtgaccaccctgacctacggcgtgcagtgcttcagccgctaccccgaccacatgaagcagcacgacttcttcaagagcgccatgcccgagggctacgtgcaggagcgcaccatcttcttcaaggacgacggcaactacaagacccgcgccgaggtgaagttcgagggcgacaccctggtgaaccgcatcgagctgaagggcatcgacttcaaggaggacggcaacatcctgggccacaagctggagtacaactacaacagccacaacgtgtacatcatggccgacaagcagaagaacggcatcaaggtgaacttcaagatccgccacaacatcgaggacggcagcgtgcagctggccgaccactaccagcagaacacccccatcggcgacggccccgtgctgctgcccgacaaccactacctgagcacccagagcgccctgagcaaggaccccaacgagaagcgcgaccacatggtgctgctggagttcgtgaccgccgccggcatcaccctgggcatggacgagctgtacaagtcaggtggatcctagataacctttaccttcattccctgtaaattggtaccctgcaaagctttcgttcgtatcatcggtttcgacaacgttcgtcaagttcaatgcatcagtttcattgcgcacacaccagaatcctactgagtttgagtattatggcattgggaaaactgtttttcttgtaccatttgttgtgcttgtaatttactgtgttttttattcggttttcgctatcgaactgtgaaatggaaatggatggagaagagttaatgaatgatatggtccttttgttcattctcaaattaatattatttgttttttctcttatttgttgtgtgttgaatttgaaattataagagatatgcaaacattttgttttgagtaaaaatgtgtcaaatcgtggcctctaatgaccgaagttaatatgaggagtaaaacacttgtagttgtaccattatgcttattcactaggcaacaaatatattttcagacctagaaaagctgcaaatgttactgaatacaagtatgtcctcttgtgttttagacatttatgaactttcctttatgtaattttccagaatccttgtcagattctaatcattgctttataattatagttatactcatggatttgtagttgagtatgaaaatattttttaatgcattttatgacttgccaattgattgacaacatgcatcaatcgactagagaattaagggagtcacgttatgacccccgccgatgacgcgggacaagccgttttacgtttggaactgacagaaccgcaacgttgaaggagccactgagccgcgggtttctggagtttaatgagctaagcacatacgtcagaaaccattattgcgcgttcaaaagtcgcctaaggtcactatcagctagcaaatatttcttgtcaaaaatgctccactgacgttccataaattcccctcggtatccaattagagtctcatattcactctcaactcgatcgaggcatgattgaacaagatggattgcacgcaggttctccggccgcttgggtggagaggctattcggctatgactgggcacaacagacaatcggctgctctgatgccgccgtgttccggctgtcagcgcaggggcgcccggttctttttgtcaagaccgacctgtccggtgccctgaatgaactccaagacgaggcagcgcggctatcgtggctggccacgacgggcgttccttgcgcagctgtgctcgacgttgtcactgaagcgggaagggactggctgctattgggcgaagtgccggggcaggatctcctgtcatctcaccttgctcctgccgagaaagtatccatcatggctgatgcaatgcggcggctgcatacgcttgatccggctacctgcccattcgaccaccaagcgaaacatcgcatcgagcgagcacgtactcggatggaagccggtcttgtcgatcaggatgatctggacgaagagcatcaggggctcgcgccagccgaactgttcgccaggctcaaggcgcggatgcccgacggcgaggatctcgtcgtgacccacggcgatgcctgcttgccgaatatcatggtggaaaatggccgcttttctggattcatcgactgtggccggctgggtgtggcggaccgctatcaggacatagcgttggctacccgtgatattgctgaagagcttggcggcgaatgggctgaccgcttcctcgtgctttacggtatcgccgctcccgattcgcagcgcatcgccttctatcgccttcttgacgagttcttctgagcgggactctggggttcggactctagctagagtcaagcagatcgttcaaacatttggcaataaagtttcttaagattgaatcctgttgccggtcttgcgatgattatcatataatttctgttgaattacgttaagcatgtaataattaacatgtaatgcatgacgttatttatgagatgggtttttatgattagagtcccgcaattatacatttaatacgcgatagaaaacaaaatatagcgcgcaaactaggataaagtattctagaccaagcatgcacagctggcgttctcagccagatccaacgttacaccacaatatatcctgccaagatctaattccggggatcggaaatccagaagcccgagaggttgccgcctttcgggctttttctttttcaaaaaaaaaaatttataaaacgatctgttgcggccggccgccgggttgtgggcaaaggcgctcgacggtgggcaaccgcttgcggttgtccacgggcggagccggtgcgcgtagcgcattgtccacaagccaagggcgaccaataattgatatatatattcataattgaaaagctaattgaacatactacttgctgtaactacttgccggagcgaggggtgtttgcaagctgttgatctgaaagggctattagcgttctcacgtgcctttttgattagcgatttcacgtgaccttattagcgatttcacgtactccgattagcgatttcacgtaccctgattagcgatttcacgtggatagtttttggagcgggccggaaagccccgtgaatcaaggctttgcggggcattagcggtttcacgtggataactaccctctatccacaggcttccggggataaaaaagcccgctcgacggcgggctgttggatggggatcgcctgaatcgccccatcatccagccagaaagtgagggagccacggttgatgagagctttgttgtaggtggaccagttggtgattttgaacttttgctttgccacggaacggtctgcgttgtcgggaagatgcgtgatctgatccttcaactcagcaaaagttcgatttattcaacaaagccacgttgtgtctcaaaatctctgatgttacattgcacaagataaaaatatatcatcatgaacaataaaactgtctgcttacataaacagtaatacaaggggtgttatgagggaagcggtgatcgccgaagtatcgactcaactatcagaggtagttggcgtcatcgagcgccatctcgaaccgacgttgctggccgtacatttgtacggctccgcagtggatggcggcctgaagccacacagtgatattgatttgctggttacggtgaccgtaaggcttgatgaaacaacgcggcgagctttgatcaacgaccttttggaaacttcggcttcccctggagagagcgagattctccgcgctgtagaagtcaccattgttgtgcacgacgacatcattccgtggcgttatccagctaagcgcgaactgcaatttggagaatggcagcgcaatgacattcttgcaggtatcttcgagccagccacgatcgacattgatctggctatcttgctgacaaaagcaagagaacatagcgttgccttggtaggtccagcggcggaggaactctttgatccggttcctgaacaggatctatttgaggcgctaaatgaaaccttaacgctatggaactcgccgcccgactgggctggcgatgagcgaaatgtagtgcttacgttgtcccgcatttggtacagcgcagtaaccggcaaaatcgcgccgaaggatgtcgctgccgactgggcaatggagcgcctgccggcccagtatcagcccgtcatacttgaagctaggcaggcttatcttggacaagaagatcgcttggcctcgcgcgcagatcagttggaagaatttgttcactacgtgaaaggcgagatcaccaaggtagtcggcaaataatcactagaccaatgttacacatatatactttagattgatttaaaacttcatttttaatttaaaaggatctaggtgaagatcctttttgataatctcatgaccaaaatcccttaacgtgagttttcgttccactgagcgtcagaccccgtagaaaagatcaaaggatcttcttgagatcctttttttctgcgcgtaatctgctgcttgcaaacaaaaaaaccaccgctaccagcggtggtttgtttgccggatcaagagctaccaactcttcttccgaaggtaactggcttcagcagagcgcagataccaaatactgttcttctagtgtagccgtagttaggccaccacttcaagaactctgtagcaccgcctacatacctcgctctgctaatcctgttaccagtggctgctgccagtggcgataagtcgtgtcttaccgggttggactcaagacgatagttaccggataaggcgcagcggtcgggctgaacggggggttcgtgcacacagcccagcttggagcgaacgacctacaccgaactgagatacctacagcgtgagctatgagaaagcgccacgcttcccgaagggagaaaggcggacaggtatccggtaagcggcagggtcggaacaggagagcgcacgagggagcttccagggggaaacgcctggtatctttatagtcctgtcgggtttcgccacctctgacttgagcgtcgatttttgtgatgctcgtcaggggggcggagcctatggaaaaacgccagcaacgcggcctttttacggttcctggccttttgctggccttttgctcacatgagatctcaaacaaacacatacagcgacttagtttacccgccaatatatcctgtcaaggctcgaactaggctcggacgaagtaagcggccgcaaccttaattaaacacggcgcgccaacagcgatcgcaccaggtacc

SEQ ID NO: 293 - DNA, 6286 bp, synthetic construct
  misc_feature 1..6286: note = pAGS-0056 Cv PAS D promoter
  source 1..6286: mol_type = other DNA
acctgatcccacacacctgcccgtctgcctgacaggaagtgaacgcatgtcgagggaggcctcaccaatcgtcacacgagccctcgtcagaaacacgtctccgccacgctctccctctcactgccgaccccgcagcccttttgccctttcctaggccaccgacaggacccaggcgctctcagcatgcctcaacaacccgtactcgtgccagcggtgcccttgtgctggtgatcgcttggaagcgcatgcgaagacgaaggggcggagcaggcggcctggctgttcgaagggctcgccgccagttcgggtgcctttctccacgcgcgcctccacacctaccgatgcgtgaaggcaggcaaatgctcatgtttgcccgaactcggagtccttaaaaagccgcttcttgtcgtcgttccgagacatgttagcagatcgcagtgccacctttcctgacgcgctcggccccatattcggacgcaattgtcatttgtagcacaattggagcaaatctggcgaggcagtaggcttttaagttgcaaggcgagagagcaaagtgggacgcggcgtgattattggtatttacgcgacggcccggcgcgttagcggcccttcccccaggccagggacgattatgtatcaatattgttgcgttcgggcactcgtgcgagggctcctgcgggctggggagggggatctgggaattggaggtacgaccgagatggcttgctcggggggaggtttcctcgccgagcaagccagggttaggtgttgcgctcttgactcgttgtgcattctaggaccccactgctactcacaacaagccaaaacagtattcagtcgactggtaccaacaggctatggtgagcaagggcgaggagctgttcaccggcgtggtgcccatcctggtggagctggacggcgacgtgaacggccacaagttcagcgtgagcggcgagggcgagggcgacgccacctacggcaagctgaccctgaagttcatctgcaccaccggcaagctgcccgtgccctggcccaccctggtgaccaccctgacctacggcgtgcagtgcttcagccgctaccccgaccacatgaagcagcacgacttcttcaagagcgccatgcccgagggctacgtgcaggagcgcaccatcttcttcaaggacgacggcaactacaagacccgcgccgaggtgaagttcgagggcgacaccctggtgaaccgcatcgagctgaagggcatcgacttcaaggaggacggcaacatcctgggccacaagctggagtacaactacaacagccacaacgtgtacatcatggccgacaagcagaagaacggcatcaaggtgaacttcaagatccgccacaacatcgaggacggcagcgtgcagctggccgaccactaccagcagaacacccccatcggcgacggccccgtgctgctgcccgacaaccactacctgagcacccagagcgccctgagcaaggaccccaacgagaagcgcgaccacatggtgctgctggagttcgtgaccgccgccggcatcaccctgggcatggacgagctgtacaagtcaggtggatcctagataacctttaccttcattccctgtaaattggtaccctgcaaagctttcgttcgtatcatcggtttcgacaacgttcgtcaagttcaatgcatcagtttcattgcgcacacaccagaatcctactgagtttgagtattatggcattgggaaaactgtttttcttgtaccatttgttgtgcttgtaatttactgtgttttttattcggttttcgctatcgaactgtgaaatggaaatggatggagaagagttaatgaatgatatggtccttttgttcattctcaaattaatattatttgttttttctcttatttgttgtgtgttgaatttgaaattataagagatatgcaaacattttgttttgagtaaaaatgtgtcaaatcgtggcctctaatgaccgaagttaatatgaggagtaaaacacttgtagttgtaccattatgcttattcactaggcaacaaatatattttcagacctagaaaagctgcaaatgttactgaatacaagtatgtcctcttgtgttttagacatttatgaactttcctttatgtaattttccagaatccttgtcagattctaatcattgctttataattatagttatactcatggatttgtagttgagtatgaaaatattttttaatgcattttatgacttgccaattgattgacaacatgcatcaatcgactagagaattaagggagtcacgttatgacccccgccgatgacgcgggacaagccgttttacgtttggaactgacagaaccgcaacgttgaaggagccactgagccgcgggtttctggagtttaatgagctaagcacatacgtcagaaaccattattgcgcgttcaaaagtcgcctaaggtcactatcagctagcaaatatttcttgtcaaaaatgctccactgacgttccataaattcccctcggtatccaattagagtctcatattcactctcaactcgatcgaggcatgattgaacaagatggattgcacgcaggttctccggccgcttgggtggagaggctattcggctatgactgggcacaacagacaatcggctgctctgatgccgccgtgttccggctgtcagcgcaggggcgcccggttctttttgtcaagaccgacctgtccggtgccctgaatgaactccaagacgaggcagcgcggctatcgtggctggccacgacgggcgttccttgcgcagctgtgctcgacgttgtcactgaagcgggaagggactggctgctattgggcgaagtgccggggcaggatctcctgtcatctcaccttgctcctgccgagaaagtatccatcatggctgatgcaatgcggcggctgcatacgcttgatccggctacctgcccattcgaccaccaagcgaaacatcgcatcgagcgagcacgtactcggatggaagccggtcttgtcgatcaggatgatctggacgaagagcatcaggggctcgcgccagccgaactgttcgccaggctcaaggcgcggatgcccgacggcgaggatctcgtcgtgacccacggcgatgcctgcttgccgaatatcatggtggaaaatggccgcttttctggattcatcgactgtggccggctgggtgtggcggaccgctatcaggacatagcgttggctacccgtgatattgctgaagagcttggcggcgaatgggctgaccgcttcctcgtgctttacggtatcgccgctcccgattcgcagcgcatcgccttctatcgccttcttgacgagttcttctgagcgggactctggggttcggactctagctagagtcaagcagatcgttcaaacatttggcaataaagtttcttaagattgaatcctgttgccggtcttgcgatgattatcatataatttctgttgaattacgttaagcatgtaataattaacatgtaatgcatgacgttatttatgagatgggtttttatgattagagtcccgcaattatacatttaatacgcgatagaaaacaaaatatagcgcgcaaactaggataaagtattctagaccaagcatgcacagctggcgttctcagccagatccaacgttacaccacaatatatcctgccaagatctaattccggggatcggaaatccagaagcccgagaggttgccgcctttcgggctttttctttttcaaaaaaaaaaatttataaaacgatctgttgcggccggccgccgggttgtgggcaaaggcgctcgacggtgggcaaccgcttgcggttgtccacgggcggagccggtgcgcgtagcgcattgtccacaagccaagggcgaccaataattgatatatatattcataattgaaaagctaattgaacatactacttgctgtaactacttgccggagcgaggggtgtttgcaagctgttgatctgaaagggctattagcgttctcacgtgcctttttgattagcgatttcacgtgaccttattagcgatttcacgtactccgattagcgatttcacgtaccctgattagcgatttcacgtggatagtttttggagcgggccggaaagccccgtgaatcaaggctttgcggggcattagcggtttcacgtggataactaccctctatccacaggcttccggggataaaaaagcccgctcgacggcgggctgttggatggggatcgcctgaatcgccccatcatccagccagaaagtgagggagccacggttgatgagagctttgttgtaggtggaccagttggtgattttgaacttttgctttgccacggaacggtctgcgttgtcgggaagatgcgtgatctgatccttcaactcagcaaaagttcgatttattcaacaaagccacgttgtgtctcaaaatctctgatgttacattgcacaagataaaaatatatcatcatgaacaataaaactgtctgcttacataaacagtaatacaaggggtgttatgagggaagcggtgatcgccgaagtatcgactcaactatcagaggtagttggcgtcatcgagcgccatctcgaaccgacgttgctggccgtacatttgtacggctccgcagtggatggcggcctgaagccacacagtgatattgatttgctggttacggtgaccgtaaggcttgatgaaacaacgcggcgagctttgatcaacgaccttttggaaacttcggcttcccctggagagagcgagattctccgcgctgtagaagtcaccattgttgtgcacgacgacatcattccgtggcgttatccagctaagcgcgaactgcaatttggagaatggcagcgcaatgacattcttgcaggtatcttcgagccagccacgatcgacattgatctggctatcttgctgacaaaagcaagagaacatagcgttgccttggtaggtccagcggcggaggaactctttgatccggttcctgaacaggatctatttgaggcgctaaatgaaaccttaacgctatggaactcgccgcccgactgggctggcgatgagcgaaatgtagtgcttacgttgtcccgcatttggtacagcgcagtaaccggcaaaatcgcgccgaaggatgtcgctgccgactgggcaatggagcgcctgccggcccagtatcagcccgtcatacttgaagctaggcaggcttatcttggacaagaagatcgcttggcctcgcgcgcagatcagttggaagaatttgttcactacgtgaaaggcgagatcaccaaggtagtcggcaaataatcactagaccaatgttacacatatatactttagattgatttaaaacttcatttttaatttaaaaggatctaggtgaagatcctttttgataatctcatgaccaaaatcccttaacgtgagttttcgttccactgagcgtcagaccccgtagaaaagatcaaaggatcttcttgagatcctttttttctgcgcgtaatctgctgcttgcaaacaaaaaaaccaccgctaccagcggtggtttgtttgccggatcaagagctaccaactcttcttccgaaggtaactggcttcagcagagcgcagataccaaatactgttcttctagtgtagccgtagttaggccaccacttcaagaactctgtagcaccgcctacatacctcgctctgctaatcctgttaccagtggctgctgccagtggcgataagtcgtgtcttaccgggttggactcaagacgatagttaccggataaggcgcagcggtcgggctgaacggggggttcgtgcacacagcccagcttggagcgaacgacctacaccgaactgagatacctacagcgtgagctatgagaaagcgccacgcttcccgaagggagaaaggcggacaggtatccggtaagcggcagggtcggaacaggagagcgcacgagggagcttccagggggaaacgcctggtatctttatagtcctgtcgggtttcgccacctctgacttgagcgtcgatttttgtgatgctcgtcaggggggcggagcctatggaaaaacgccagcaacgcggcctttttacggttcctggccttttgctggccttttgctcacatgagatctcaaacaaacacatacagcgacttagtttacccgccaatatatcctgtcaaggctcgaactaggctcggacgaagtaagcggccgcaaccttaattaaacacggcgcgccaacagcgatcgcaccaggtacc

SEQ ID NO: 294 - DNA, 8825 bp, synthetic construct
  misc_feature 1..8825: note = pAGS-0057 (pIT 69) CAM 35S promoter
  source 1..8825: mol_type = other DNA
agcccgctcgacggcgggctgttggatggggatcgcctgaatcgccccatcatccagccagaaagtgagggagccacggttgatgagagctttgttgtaggtggaccagttggtgattttgaacttttgctttgccacggaacggtctgcgttgtcgggaagatgcgtgatctgatccttcaactcagcaaaagttcgatttattcaacaaagccacgttgtgtctcaaaatctctgatgttacattgcacaagataaaaatatatcatcatgaacaataaaactgtctgcttacataaacagtaatacaaggggtgttatgagggaagcggtgatcgccgaagtatcgactcaactatcagaggtagttggcgtcatcgagcgccatctcgaaccgacgttgctggccgtacatttgtacggctccgcagtggatggcggcctgaagccacacagtgatattgatttgctggttacggtgaccgtaaggcttgatgaaacaacgcggcgagctttgatcaacgaccttttggaaacttcggcttcccctggagagagcgagattctccgcgctgtagaagtcaccattgttgtgcacgacgacatcattccgtggcgttatccagctaagcgcgaactgcaatttggagaatggcagcgcaatgacattcttgcaggtatcttcgagccagccacgatcgacattgatctggctatcttgctgacaaaagcaagagaacatagcgttgccttggtaggtccagcggcggaggaactctttgatccggttcctgaacaggatctatttgaggcgctaaatgaaaccttaacgctatggaactcgccgcccgactgggctggcgatgagcgaaatgtagtgcttacgttgtcccgcatttggtacagcgcagtaaccggcaaaatcgcgccgaaggatgtcgctgccgactgggcaatggagcgcctgccggcccagtatcagcccgtcatacttgaagctaggcaggcttatcttggacaagaagatcgcttggcctcgcgcgcagatcagttggaagaatttgttcactacgtgaaaggcgagatcaccaaggtagtcggcaaataatcactagaccaatgttacacatatatactttagattgatttaaaacttcatttttaatttaaaaggatctaggtgaagatcctttttgataatctcatgaccaaaatcccttaacgtgagttttcgttccactgagcgtcagaccccgtagaaaagatcaaaggatcttcttgagatcctttttttctgcgcgtaatctgctgcttgcaaacaaaaaaaccaccgctaccagcggtggtttgtttgccggatcaagagctaccaactcttcttccgaaggtaactggcttcagcagagcgcagataccaaatactgttcttctagtgtagccgtagttaggccaccacttcaagaactctgtagcaccgcctacatacctcgctctgctaatcctgttaccagtggctgctgccagtggcgataagtcgtgtcttaccgggttggactcaagacgatagttaccggataaggcgcagcggtcgggctgaacggggggttcgtgcacacagcccagcttggagcgaacgacctacaccgaactgagatacctacagcgtgagctatgagaaagcgccacgcttcccgaagggagaaaggcggacaggtatccggtaagcggcagggtcggaacaggagagcgcacgagggagcttccagggggaaacgcctggtatctttatagtcctgtcgggtttcgccacctctgacttgagcgtcgatttttgtgatgctcgtcaggggggcggagcctatggaaaaacgccagcaacgcggcctttttacggttcctggccttttgctggccttttgctcacatgagatctcaaacaaacacatacagcgacttagtttacccgccaatatatcctgtcaaggctcgaactaggctcggacgaagtaagcggccgcaaccttaattaaacacggcgcgccaacagcgatcgcaccaggtaccacctccgatccattcggtccccagattagccttttcaatttcagaaagaatgctaacccacagatggttagagaggcttacgcagcacgtctcatcaagacgatctacccgagcaataatctccaggaaatcaaataccttcccaagaaggttaaagatgcagtcaaaagattcaggactaactgcatcaagaacacagagaaagatatatttctcaagatcagaagtactattccagtatggacgattcaaggcttgcttcacaaaccaaggcaagtaatagagattggagtctctaaaaaggtagttcccactgaatcaaaggccatggagtcaaagattcaaatagaggacctaacagaactcgccgtaaagactggcgaacagttcatacagagtctcttacgactcaatgacaagaagaaaatcttcgtcaacatggtggagcacgacacacttgtctactccaaaaatatcaaagatacagtctcagaagaccaaagggcaattgagacttttcaacaaagggtaatatccggaaacctcctcggattccattgcccagctatctgtcactttattgtgaagatagtggaaaaggaaggtggctcctacaaatgccatcattgcgataaaggaaaggccatcgttgaagatgcctctgccgacagtggtcccaaagatggacccccacccacgaggagcatcgtggaaaaagaagacgttccaaccacgtcttcaaagcaagtggattgatgtgatatctccactgacgtaagggatgacgcacaatcccactatccttcgcaagacccttcctctatataaggaagttcatttcatttggagagaacacgggggacgagctaacaaacataaagaaaggcccggcgccattctatccgctggaagatggaaccgctggagagcaactgcataaggctatgaagagatacgccctggttcctggaacaattgcttttacagatgcacatatcgaggtggacatcacttacgctgagtacttcgaaatgtccgttcggttggcagaagctatgaaacgatatgggctgaatacaaatcacagaatcgtcgtatgcagtgaaaactctcttcaattctttatgccggtgttgggcgcgttatttatcggagttgcagttgcgcccgcgaacgacatttataatgaacgtgaattgctcaacagtatgggcatttcgcagcctaccgtggtgttcgtttcggctggcgcgcccaatcgatgatttaaatgtgtaagaatttcttatgttacattattacattcaacgttttatcttaattggctcttcatttgattgaaatttgacaattatttcttgtttttttttttgtcacactctttttgggttggggtggccgacgaattgtgggaaggtagaaagaggggaggacttttgttatactccattagtaattactgtttccgtttcaatttatgtgacaatatttcctttttagtcggttccaaaagaaaatgtcagcattataaacaatttaattttgaaattacaattttgccattaataaaatgatttacaaccacaaaagtatctatgagcctgtttgggtgggcttataagcagcttattttaagtggcttataagtcaaaaagtgacattttttgagaagttagaaaatcctaacttctcaaaaagtagcttttaagccacttatgacttataagtccaaaaatttttaagttaccaaacatatattaatgggtttataagcttataagccacttttaagctcacccaaacgggttctatgtctcactttagactacaaattttaaaagtcttcatttatttcttaatctccgtggcgagtaaaactataacacataaagtgaaacggagggaataagatggagtcataaactaatccaaatctatactctctccgttaatttgttttttagtttgatttggtacattaataaaacagatttttcgaaggttataaacacagacagatgtttcccagcgagctagcaaaattccaagatttctgtcgaaaattcgtgtgtttctagctagtacttgatgttatctttaaccttttagtaattttttgtccttttctttctatttttcatcttacaatgaattatgagcaagttccttaagtagcatcacacgtgagatgttttttatgatattgactaaatccaatctttaccattccttaactagtaaaatacaacacatgttaattgatacattgcttaacactgaggttagaaaattttagaaattagttgtccaaatgctttgaaattagaaatctttaatcccttatttttttttaaaatgttttttctcactccaaagaaagagaaactgacatgaaagctcaaaagatcatgaatcttactaactttgtggaactaaatgtacatcagaatgtttctgacatgtgaaaatgaaagctcttaattttcttcttttatttattgagggtttttgcatgctatgcattcaatttgagtactttaaagcacctataaacacttacttacacttgccttggagtttatgttttagtgttttcttcacatcttttttggtcaatttgcaggtatttggatcctaggtgagtctagaggcgcgcctcaggaaacgaacaccacggtaggctgcgaaatgcccatactgttgagcaattcacgttcattataaatgtcgttcgcgggcgcaactgcaactccgataaataacgcgcccaacaccggcataaagaattgaagagagttttcactgcatacgacgattctgtgatttgtattcagcccatatcgtttcatagcttctgccaaccgaacggacatttcgaagtactcagcgtaagtgatgtccacctcgatatgtgcatctgtaaaagcaattgttccaggaaccagggcgtatctcttcatagccttatgcagttgctctccagcggttccatcttccagcggatagaatggcgccgggcctttctttatgttctgcaaagctttcgttcgtatcatcggtttcgacaacgttcgtcaagttcaatgcatcagtttcattgcgcacacaccagaatcctactgagtttgagtattatggcattgggaaaactgtttttcttgtaccatttgttgtgcttgtaatttactgtgttttttattcggttttcgctatcgaactgtgaaatggaaatggatggagaagagttaatgaatgatatggtccttttgttcattctcaaattaatattatttgttttttctcttatttgttgtgtgttgaatttgaaattataagagatatgcaaacattttgttttgagtaaaaatgtgtcaaatcgtggcctctaatgaccgaagttaatatgaggagtaaaacacttgtagttgtaccattatgcttattcactaggcaacaaatatattttcagacctagaaaagctgcaaatgttactgaatacaagtatgtcctcttgtgttttagacatttatgaactttcctttatgtaattttccagaatccttgtcagattctaatcattgctttataattatagttatactcatggatttgtagttgagtatgaaaatattttttaatgcattttatgacttgccaattgattgacaacatgcatcaatcgactagtcgacgagtcagtaataaacggcgtcaaagtggttgcagccggcacacacgagtcgtgtttatcaactcaaagcacaaatacttttcctcaacctaaaaataaggcaattagccaaaaacaactttgcgtgtaaacaacgctcaatacacgtgtcattttattattagctattgcttcaccgccttagctttctcgtgacctagtcgtcctcgtcttttcttcttcttcttctataaaacaatacccaaagagctcttcttcttcacaattcagatttcaatttctcaaaatcttaaaaactttctctcaattctctctaccgtgatcaaggtaaatttctgtgttccttattctctcaaaatcttcgattttgttttcgttcgatcccaatttcgtatatgttctttggtttagattctgttaatcttagatcgaagacgattttctgggtttgatcgttagatatcatcttaattctcgattagggtttcatagatatcatccgatttgttcaaataatttgagttttgtcgaataattactcttcgatttgtgatttctatctagatctggtgttagtttctagtttgtgcgatcgaatttgtagattaatctgagtttttctgattaacaccacaccaatctggtaccagaaaaggggagaagcaaaaccatgggtaaaaagcctgaactcaccgcgacgtctgtcgagaagtttctgatcgaaaagttcgacagcgtctccgacctgatgcagctctcggagggcgaagaatctcgtgctttcagcttcgatgtaggagggcgtggatatgtcctgcgggtaaatagctgcgccgatggtttctacaaagatcgttatgtttatcggcactttgcatcggccgcgctcccgattccggaagtgcttgacattggggcattcagcgagagcctgacctattgcatctcccgccgtgcacagggtgtcacgttgcaagacctgcctgaaaccgaactgcccgctgttctgcaaccggtcgcggaggcgatggatgccatcgctgcggccgatcttagccagacgagcgggttcggcccattcggaccgcaaggaatcgtcaatacactacatggcgtgatttcatatgcgcgattgctgatccccatgtgtatcactggcaaactgtgatggacgacaccgtcagtgcgtccgtcgcgcaggctctcgatgagctgatgctttgggccgaggactgccccgaagtccggcacctcgtgcacgcggatttcggctccaacaatgtcctgacggacaatggccgcataacagcggtcattgactggagcgaggcgatgttcggggattcccaatacgaggtcgccaacatcttcttctggaggccgtggttggcttgtatggagcagcagacgcgctacttcgagcggaggcatccggagcttgcaggatcgccgcggctccgggcgtatatgctccgcattggtcttgaccaactctatcagagcttggttgacggcaatttcgatgatgcagcttgggcgcagggtcgatgcgacgcaatcgtccgatccggagccgggactgtcgggcgtacacaaatcgcccgcagaagcgcggccgtctggaccgatggctgtgtagaagtactcgccgatagtggaaaccgacgccccagcactcgtccgagggcaaaggaatagatgcatcctgctttaatgagatatgcgagacgcctatgatcgcatgatatttgctttcaattctgttgtgcacgttgtaaaaaacctgagcatgtgtagctcagatccttaccgccggtttcggttcattctaatgaatatatcacccgttactatcgtatttttatgaataatattctccgttcaatttactgattgtaccctactacttatatgtacaatattaaaatgaaaacaatatattgtgctgaataggtttatagcgacatctatgatagagcgccacaataacaaacaattgcgttttattattacaaatccaattttaaaaaaagcggcagaaccggtcaaacctaaaagactgattacataaatcttattcaaatttcaaaagtgccccaggggctagtatctacgacacaccgagcggcgaactaataacgctcactgaagggaactccggttccccgccggcgcgcatgggtgagattccttgaagttgagtattggccgtccgctctaccgaaagttacgggcaccattcaacccggtccagcacggcggccgggtaaccgacttgctgccccgagaattatgcagcatttttttggtgtatgtgggccccaaatgaagtgcaggtcaaaccttgacagtgacgacaaatcgttgggcgggtccagggcgaattttgcgacaacatgtcgaggctcagcaggaccggcatgcaagctagcttactagtgatattctatagtgtcacctaaatgtattctagaccaagcatgcacagctggcgttctcagccagatccaacgttacaccacaatatatcctgccaagatctaattccggggatcggaaatccagaagcccgagaggttgccgcctttcgggctttttctttttcaaaaaaaaaaatttataaaacgatctgttgcggccggccgccgggttgtgggcaaaggcgctcgacggtgggcaaccgcttgcggttgtccacgggcggagccggtgcgcgtagcgcattgtccacaagccaagggcgaccaataattgatatatatattcataattgaaaagctaattgaacatactacttgctgtaactacttgccggagcgaggggtgtttgcaagctgttgatctgaaagggctattagcgttctcacgtgcctttttgattagcgatttcacgtgaccttattagcgatttcacgtactccgattagcgatttcacgtaccctgattagcgatttcacgtggatagtttttggagcgggccggaaagccccgtgaatcaaggctttgcggggcattagcggtttcacgtggataactaccctctatccacaggcttccggggataaaaa

SEQ ID NO: 295 - DNA, 27 bp, synthetic construct
  misc_feature 1..27: note = A407F1 Cam35S Promoter
  source 1..27: mol_type = other DNA
caaagatacagtctcagaagaccaaag

SEQ ID NO: 296 - DNA, 21 bp, synthetic construct
  misc_feature 1..21: note = A407R1 Cam35S Promoter
  source 1..21: mol_type = other DNA
gaagggtcttgcgaaggatag

SEQ ID NO: 297 - DNA, 22 bp, synthetic construct
  misc_feature 1..22: note = A407F2 Cam35S promoter
  source 1..22: mol_type = other DNA
gaagaccaaagggctattgaga

SEQ ID NO: 298 - DNA, 21 bp, synthetic construct
  misc_feature 1..21: note = A407R2 Cam35S promoter
  source 1..21: mol_type = other DNA
cttgctttgaagacgtggttg

SEQ ID NO: 299 - DNA, 19 bp, synthetic construct
  misc_feature 1..19: note = A401F1 EF2 promoter
  source 1..19: mol_type = other DNA
gattcgttcccgtcacaga

SEQ ID NO: 300 - DNA, 20 bp, synthetic construct
  misc_feature 1..20: note = A401R1 EF2 promoter
  source 1..20: mol_type = other DNA
aagattcaccacggcttcac

SEQ ID NO: 301 - DNA, 22 bp, synthetic construct
  misc_feature 1..22: note = A401F2 EF2 promoter
  source 1..22: mol_type = other DNA
ccttccattttgacatgtttcc

SEQ ID NO: 302 - DNA, 20 bp, synthetic construct
  misc_feature 1..20: note = A401R2 EF2 promoter
  source 1..20: mol_type = other DNA
tgtgtggagagaacgagcag

SEQ ID NO: 303 - DNA, 20 bp, synthetic construct
  misc_feature 1..20: note = A403F1 H4 promoter
  source 1..20: mol_type = other DNA
aagtatggcgcaggtatggt

SEQ ID NO: 304 - DNA, 20 bp, synthetic construct
  misc_feature 1..20: note = A403R1 H4 promoter
  source 1..20: mol_type = other DNA
gcgaattgtgagtgcttcct

SEQ ID NO: 305 - DNA, 19 bp, synthetic construct
  misc_feature 1..19: note = A403F3 H4 promoter
  source 1..19: mol_type = other DNA
aggtccgtggacttctggt

SEQ ID NO: 306 - DNA, 20 bp, synthetic construct
  misc_feature 1..20: note = A403R3 H4 promoter
  source 1..20: mol_type = other DNA
gttcacaggccgtaggtttc

SEQ ID NO: 307 - DNA, 21 bp, synthetic construct
  misc_feature 1..21: note = A405F1 Lhcf1 promoter
  source 1..21: mol_type = other DNA
ggattatcaccgcaaaaatga

SEQ ID NO: 308 - DNA, 23 bp, synthetic construct
  misc_feature 1..23: note = A405R1 Lhcf1 promoter
  source 1..23: mol_type = other DNA
tatttgctaccagagcaatccac

SEQ ID NO: 309 - DNA, 20 bp, synthetic construct
  misc_feature 1..20: note = A405F2 Lhcf1 promoter
  source 1..20: mol_type = other DNA
ggaggattatcaccgcaaaa

SEQ ID NO: 310 - DNA, 23 bp, synthetic construct
  misc_feature 1..23: note = A405R2 Lhcf1 promoter
  source 1..23: mol_type = other DNA
atgttgagccaatctagcagaag

SEQ ID NO: 311 - DNA, 27 bp, synthetic construct
  misc_feature 1..27: note = A427F1 MAS promoter
  source 1..27: mol_type = other DNA
caaagatacagtctcagaagaccaaag

SEQ ID NO: 312 - DNA, 21 bp, synthetic construct
  misc_feature 1..21: note = A427R1 MAS promoter
  source 1..21: mol_type = other DNA
gaagggtcttgcgaaggatag

SEQ ID NO: 313 - DNA, 22 bp, synthetic construct
  misc_feature 1..22: note = A427F2 MAS promoter
  source 1..22: mol_type = other DNA
gaagaccaaagggctattgaga

SEQ ID NO: 314 - DNA, 21 bp, synthetic construct
  misc_feature 1..21: note = A427R2 MAS promoter
  source 1..21: mol_type = other DNA
cttgctttgaagacgtggttg

SEQ ID NO: 315 - DNA, 21 bp, synthetic construct
  misc_feature 1..21: note = E001F1 terminator
  source 1..21: mol_type = other DNA
tgaaatggaaatggatggaga

SEQ ID NO: 316 - DNA, 22 bp, synthetic construct
  misc_feature 1..22: note = E001R1 terminator
  source 1..22: mol_type = other DNA
ttgagaatgaacaaaaggacca

SEQ ID NO: 317 - DNA, 27 bp, synthetic construct
  misc_feature 1..27: note = E001F2 terminator
  source 1..27: mol_type = other DNA
tcatggatttgtagttgagtatgaaaa

SEQ ID NO: 318 - DNA, 22 bp, synthetic construct
  misc_feature 1..22: note = E001R2 terminator
  source 1..22: mol_type = other DNA
catagtcgattgatgcatgttg

SEQ ID NO: 319 - DNA, 20 bp, synthetic construct
  misc_feature 1..20: note = A431F1 PAR Promoter
  source 1..20: mol_type = other DNA
gcacccatccggtataaaag

SEQ ID NO: 320 - DNA, 20 bp, synthetic construct
  misc_feature 1..20: note = A431R1 PAR Promoter
  source 1..20: mol_type = other DNA
taagggttgcaagtgctcaa

SEQ ID NO: 321 - DNA, 20 bp, synthetic construct
  misc_feature 1..20: note = A431F2 PAR Promoter
  source 1..20: mol_type = other DNA
tgaggcttgacatgattggt

SEQ ID NO: 322 - DNA, 20 bp, synthetic construct
  misc_feature 1..20: note = A431R2 PAR Promoter
  source 1..20: mol_type = other DNA
taagggttgcaagtgctcaa

SEQ ID NO: 323 - DNA, 19 bp, synthetic construct
  misc_feature 1..19: note = A432F1 Cv-PSAD promoter
  source 1..19: mol_type = other DNA
acacctaccgatgcgtgaa

SEQ ID NO: 324 - DNA, 20 bp, synthetic construct
  misc_feature 1..20: note = A432R1 Cv-PSAD promoter
  source 1..20: mol_type = other DNA
ctcggaacgacgacaagaag

SEQ ID NO: 325 - DNA, 20 bp, synthetic construct
  misc_feature 1..20: note = A432F2 Cv-PSAD promoter
  source 1..20: mol_type = other DNA
tctcagcatgcctcaacaac

SEQ ID NO: 326 - DNA, 19 bp, synthetic construct
  misc_feature 1..19: note = A432R2 Cv-PSAD promoter
  source 1..19: mol_type = other DNA
ctcggaacgacgacaagaa

SEQ ID NO: 327 - DNA, 19 bp, synthetic construct
  misc_feature 1..19: note = FLUCF1
  source 1..19: mol_type = other DNA
ctacggcctgaacaccaac

SEQ ID NO: 328 - DNA, 18 bp, synthetic construct
  misc_feature 1..18: note = FLUCR1
  source 1..18: mol_type = other DNA
agcacgggcatgaagaac

SEQ ID NO: 329 - DNA, 18 bp, synthetic construct
  misc_feature 1..18: note = FLUCF2 FLUC MC
  source 1..18: mol_type = other DNA
ccatcttcggcaaccaga

SEQ ID NO: 330 - DNA, 19 bp, synthetic construct
  misc_feature 1..19: note = FLUCR2 FLUC MC
  source 1..19: mol_type = other DNA
aagcggtacatcagcacca

SEQ ID NO: 331 - DNA, 19 bp, synthetic construct
  misc_feature 1..19: note = FLUCF3 FLUC MC
  source 1..19: mol_type = other DNA
cttcttcgaggccaaggtg

SEQ ID NO: 332 - DNA, 18 bp, synthetic construct
  misc_feature 1..18: note = FLUCR3 FLUC MC
  source 1..18: mol_type = other DNA
cgtcccagtaggcgatgt

SEQ ID NO: 333 - DNA, 20 bp, synthetic construct
  misc_feature 1..20: note = FLUCF4 FLUC MC
  source 1..20: mol_type = other DNA
aagaccatgaccgagaagga

SEQ ID NO: 334 - DNA, 20 bp, synthetic construct
  misc_feature 1..20: note = FLUCR4 FLUC MC
  source 1..20: mol_type = other DNA
ttggccttgatcaggatctc

SEQ ID NO: 335 - DNA, 20 bp, synthetic construct
  misc_feature 1..20: note = eGFPF1 eGFP
  source 1..20: mol_type = other DNA
cagaagaacggcatcaaggt

SEQ ID NO: 336 - DNA, 20 bp, synthetic construct
  misc_feature 1..20: note = eGFPR1 eGFP
  source 1..20: mol_type = other DNA
ctgggtgctcaggtagtggt

SEQ ID NO: 337 - DNA, 18 bp, synthetic construct
  misc_feature 1..18: note = eGFPF2 eGFP
  source 1..18: mol_type = other DNA
cccgaccacatgaagcag

SEQ ID NO: 338 - DNA, 20 bp, synthetic construct
  misc_feature 1..20: note = eGFPR2 eGFP
  source 1..20: mol_type = other DNA
tcgtccttgaagaagatggt

SEQ ID NO: 339 - DNA, 19 bp, synthetic construct
  misc_feature 1..19: note = eGFPF3 eGFP
  source 1..19: mol_type = other DNA
aggagcgcaccatcttctt

SEQ ID NO: 340 - DNA, 20 bp, synthetic construct
  misc_feature 1..20: note = eGFPR3 eGFP
  source 1..20: mol_type = other DNA
gttcaccttgatgccgttct

SEQ ID NO: 341 - DNA, 19 bp, synthetic construct
  misc_feature 1..19: note = eGFPF4 eGFP
  source 1..19: mol_type = other DNA
ggcaagctgaccctgaagt

SEQ ID NO: 342 - DNA, 20 bp, synthetic construct
  misc_feature 1..20: note = eGFPR4 eGFP
  source 1..20: mol_type = other DNA
atgccgttcttctgcttgtc

SEQ ID NO: 343 - DNA, 20 bp, synthetic construct
  misc_feature 1..20: note = FLUC2F1 FLUC
  source 1..20: mol_type = other DNA
attctttatgccggtgttgg

SEQ ID NO: 344 - DNA, 18 bp, synthetic construct
  misc_feature 1..18: note = FLUC2R1 FLUC
  source 1..18: mol_type = other DNA
acggtaggctgcgaaatg

SEQ ID NO: 345 - DNA, 20 bp, synthetic construct
  misc_feature 1..20: note = FLUC2F2 FLUC
  source 1..20: mol_type = other DNA
tgtcgctctgcctcatagaa

SEQ ID NO: 346 - DNA, 20 bp, synthetic construct
  misc_feature 1..20: note = FLUC2R2 FLUC
  source 1..20: mol_type = other DNA
aaaaccgtgatggaatggaa

SEQ ID NO: 347 - DNA, 19 bp, synthetic construct
  misc_feature 1..19: note = FLUC2F3 FLUC
  source 1..19: mol_type = other DNA
cgcggtcggtaaagttgtt

SEQ ID NO: 348 - DNA, 20 bp, synthetic construct
  misc_feature 1..20: note = FLUC2R3 FLUC
  source 1..20: mol_type = other DNA
tcacacacagttcgcctctt

SEQ ID NO: 349 - DNA, 20 bp, synthetic construct
  misc_feature 1..20: note = FLUC2F4 FLUC
  source 1..20: mol_type = other DNA
tgacggaaaaagagatcgtg

SEQ ID NO: 350 - DNA, 20 bp, synthetic construct
  misc_feature 1..20: note = FLUC2R4 FLUC
  source 1..20: mol_type = other DNA
cgcggttgttacttgactgg

SEQ ID NO: 351 - DNA, 21 bp, synthetic construct
  misc_feature 1..21: note = F005F4 Hygromycin
  source 1..21: mol_type = other DNA
tgaaatggaaatggatggaga

SEQ ID NO: 352 - DNA, 22 bp, synthetic construct
  misc_feature 1..22: note = F005R4 Hygromycin
  source 1..22: mol_type = other DNA
ttgagaatgaacaaaaggacca

SEQ ID NO: 353 - DNA, 27 bp, synthetic construct
  misc_feature 1..27: note = F005F5 Hygromycin
  source 1..27: mol_type = other DNA
tcatggatttgtagttgagtatgaaaa

SEQ ID NO: 354 - DNA, 22 bp, synthetic construct
  misc_feature 1..22: note = F005R5 Hygromycin
  source 1..22: mol_type = other DNA
catagtcgattgatgcatgttg

SEQ ID NO: 355 - DNA, 19 bp, synthetic construct
  misc_feature 1..19: note = F005F1 Hygromycin
  source 1..19: mol_type = other DNA
cgttcgatcccaatttcgt

SEQ ID NO: 356 - DNA, 24 bp, synthetic construct
  misc_feature 1..24: note = F005R1 Hygromycin
  source 1..24: mol_type = other DNA
tgatatctaacgatcaaacccaga

SEQ ID NO: 357 - DNA, 20 bp, synthetic construct
  misc_feature 1..20: note = F005F2 Hygromycin
  source 1..20: mol_type = other DNA
aaaagttcgacagcgtctcc

SEQ ID NO: 358 - DNA, 20 bp, synthetic construct
  misc_feature 1..20: note = F005R2
  source 1..20: mol_type = other DNA
tatccacgccctcctacatc

SEQ ID NO: 359 - DNA, 24 bp, synthetic construct
  misc_feature 1..24: note = F005F3
  source 1..24: mol_type = other DNA
caaggaatcggtcaatacactaca

SEQ ID NO: 360 - DNA, 19 bp, synthetic construct
  misc_feature 1..19: note = F005R3
  source 1..19: mol_type = other DNA
agcaatcgcgcatatgaaa

SEQ ID NO: 361 - DNA, 20 bp, synthetic construct
  misc_feature 1..20: note = KanF1
  source 1..20: mol_type = other DNA
cgaggcatgattgaacaaga

SEQ ID NO: 362 - DNA, 20 bp, synthetic construct
  misc_feature 1..20: note = KanR1
  source 1..20: mol_type = other DNA
gcccagtcatagccgaatag

SEQ ID NO: 363 - DNA, 20 bp, synthetic construct
  misc_feature 1..20: note = KanF2
  source 1..20: mol_type = other DNA
gccgttttacgtttggaact

SEQ ID NO: 364 - DNA, 20 bp, synthetic construct
  misc_feature 1..20: note = KanR2
  source 1..20: mol_type = other DNA
aacgcgcaataatggtttct

SEQ ID NO: 365 - DNA, 20 bp, synthetic construct
  misc_feature 1..20: note = KanF3
  source 1..20: mol_type = other DNA
ggatgatctggacgaagagc

SEQ ID NO: 366 - DNA, 20 bp, synthetic construct
  misc_feature 1..20: note = KanR3
  source 1..20: mol_type = other DNA
ggccattttccaccatgata

SEQ ID NO: 367 - DNA, 18 bp, synthetic construct
  misc_feature 1..18: note = A601F1
  source 1..18: mol_type = other DNA
gcgtggatagcggtttga

SEQ ID NO: 368 - DNA, 20 bp, synthetic construct
  misc_feature 1..20: note = A601R1
  source 1..20: mol_type = other DNA
ggcggagttgttacgacatt

SEQ ID NO: 369 - DNA, 19 bp, synthetic construct
  misc_feature 1..19: note = A601F2
  source 1..19: mol_type = other DNA
atgcggttttggcagtaca

SEQ ID NO: 370 - DNA, 26 bp, synthetic construct
  misc_feature 1..26: note = A601R2
  source 1..26: mol_type = other DNA
cttataatagacctcccaccgtacac

SEQ ID NO: 371 - DNA, 19 bp, synthetic construct
  misc_feature 1..19: note = A602F1
  source 1..19: mol_type = other DNA
taccatggtgatgcggttt

SEQ ID NO: 372 - DNA, 20 bp, synthetic construct
  misc_feature 1..20: note = A602R1
  source 1..20: mol_type = other DNA
aagtcccgttgattttggtg

SEQ ID NO: 373 - DNA, 25 bp, synthetic construct
  misc_feature 1..25: note = A602F2
  source 1..25: mol_type = other DNA
tcaataatgacgtatgttcccatag

SEQ ID NO: 374 - DNA, 25 bp, synthetic construct
  misc_feature 1..25: note = A602R2
  source 1..25: mol_type = other DNA
cttaratagacctcccaccgtacac

SEQ ID NO: 375 - DNA, 18 bp, synthetic construct
  misc_feature 1..18: note = A603F1
  source 1..18: mol_type = other DNA
ccatagtcccgcccctaa

SEQ ID NO: 376 - DNA, 21 bp, synthetic construct
  misc_feature 1..21: note = A603R1
  source 1..21: mol_type = other DNA
tcggcctctgcataaataaaa

SEQ ID NO: 377 - DNA, 20 bp, synthetic construct
  misc_feature 1..20: note = A603F2
  source 1..20: mol_type = other DNA
cagcaaccaggtgtgggaaa

SEQ ID NO: 378 - DNA, 20 bp, synthetic construct
  misc_feature 1..20: note = A603R2
  source 1..20: mol_type = other DNA
aaagcctaggcctccaaaaa

SEQ ID NO: 379 - DNA, 22 bp, synthetic construct
  misc_feature 1..22: note = A604F1
  source 1..22: mol_type = other DNA
gcggaacccctatttgtttatt

SEQ ID NO: 380 - DNA, 20 bp, synthetic construct
  misc_feature 1..20: note = A604R1
  source 1..20: mol_type = other DNA
ttccacagctggttctttcc

SEQ ID NO: 381 - DNA, 21 bp, synthetic construct
  misc_feature 1..21: note = A604F2
  source 1..21: mol_type = other DNA
tccgctcatgagacaataacc

SEQ ID NO: 382 - DNA, 19 bp, synthetic construct
  misc_feature 1..19: note = A604R2
  source 1..19: mol_type = other DNA
agttaggggcgggactatg

SEQ ID NO: 383 - DNA, 19 bp, synthetic construct
  source 1..19: mol_type = other DNA; note = GAPDH_Forward
atggggaaggtgaaggtcg

SEQ ID NO: 384 - DNA, 22 bp, synthetic construct
  source 1..22: mol_type = other DNA; note = GAPDH_Reverse
gggtcattgatggcaacaatat

SEQ ID NO: 385 - DNA, 20 bp, synthetic construct
  source 1..20: mol_type = other DNA; note = PDL1_Forward
tcacggttcccaaggaccta

SEQ ID NO: 386 - DNA, 20 bp, synthetic construct
  source 1..20: mol_type = other DNA; note = PD-L1_Reverse
aggtcttcctctccatgcac

SEQ ID NO: 387 - DNA, 21 bp, synthetic construct
  source 1..21: mol_type = other DNA; note = IL-6_Forward
ggtacatcctcgacggcatct

SEQ ID NO: 388 - DNA, 21 bp, synthetic construct
  source 1..21: mol_type = other DNA; note = IL-6_Reverse
gtgcctctttgctgctttcac

SEQ ID NO: 389 - DNA, 21 bp, synthetic construct
  source 1..21: mol_type = other DNA; note = IL-1Beta_Forward
acagatgaagtgctccttcca

SEQ ID NO: 390 - DNA, 21 bp, synthetic construct
  source 1..21: mol_type = other DNA; note = IL-1Beta_Reverse
gtcggagattcgtagctggat

SEQ ID NO: 391 - DNA, 23 bp, synthetic construct
  source 1..23: mol_type = other DNA; note = TNF-alpha_Forward
ccaggcagtcagatcatcttctc

SEQ ID NO: 392 - DNA, 23 bp, synthetic construct
  source 1..23: mol_type = other DNA; note = TNF-alpha_Reverse
agctggttatctctcagctccac

SEQ ID NO: 393 - DNA, 359 bp, Phaeodactylum tricornutum
  source 1..359: mol_type = genomic DNA; note = EF2 (elongation factor 2) Promoter Sequence
ccttccattttgacatgtttcctagctagaaggaacagctattcatatgaattttccgaggtcacgctgtgatggatcgattcgttcccgtcacagacgcaagcagcgaggtgatggctggacgggcacgcgtcacaatttagaacaacccggactcttgtgacgcgagctccgggtgcggaaaaccctacggggtgaaaggagccgcagcttccacccatttacttgactgataacccagtacacacaacgctaccgtgacggaaatgccgcgcgctgtgaagccgtggtgaatctttcgctgctgctcgttctctccacacacacaacagtattcagtcgactggtaccaacaggct

SEQ ID NO: 394 - DNA, 759 bp, Penicillium funiculosum
  source 1..759: mol_type = genomic DNA; note = H4 (Histone 4) Promoter
tgtggatgtgatttatttgatgaatgggataagtttgatgatggaaagtgatggtgttgatggatggtaatcactgagtggacggatgagagagagatgtaggagggaagagaaagtgggcggggggaaagtatttgtagtgggcgaggggcgggtgggtgatctgggtgactgcctgttgggcgggcgcagatttggatcagaaaaaccgggcgggaaagctggctgcgataagcgtgattctgacgcgcagtttttgttagggaaatcagaatgaatatgctggagcccccggcttggcgggactagtgagtatgtaagcgagtctgatcttcccgcccgccaatcaaatcgcaggatcacagaatgcaaataccttctgatcccaaccacaaccagtatttctgattcgaatcaaaatcgtggcatgtaattcgcgggatcagaatgcggtttccaccggccaaaatgaccgatctgcgttgccacggctggtaatggcaggatcagagcagcagcgttgaatcagtcagatcaagcggcgctcccgctgattggccagatcacccactagcgcgtgatcccaggcaccttcccgcgtccggctctttctatagaaatatctcccgccgcgtcttccttcccaccttctttctcctctccatctccagctccatcttcaagcttactcaacattatcaacgcgtttacgcatccacattcaattacttatcatctcatccccatacatctatcaaa

SEQ ID NO: 395 - DNA, 442 bp, Phaeodactylum tricornutum
  source 1..442: mol_type = genomic DNA; note = Lhcf1 Promoter
gcaatggaggattatcaccgcaaaaatgaacttcgaaaaaaactttcgagcgaccatggaaaaggaggatcagattcagattacaacagtggattgctctggtagcaaatatcttctgctagattggctcatggtcggttttggacgttcgaagctcaccgtcaaaagaaacaaaagagaagaatgacgtcttcgtgacgtagaatctacgactgtactcggatctgggaaatgaattgactcacggtcttcttcgagtcctgttacaggcccttggtccgaacccccacacgatttttgcaccaaagatttgcttcaatttgctggatgttttgactgcaagatcagctggcctagcaagagtgctcgtgttgcttcgtcgggaatccctacgaatttcagttctgcacaaatttgtctgccgtttcgagatatcattcaa

SEQ ID NO: 396 - DNA, 263 bp, Nicotiana tabacum
  source 1..263: mol_type = genomic DNA; note = Ubi.U4 Promoter Sequence
aaaaaaaaactcaaccttgattttgttgtacctggttgaatttgttattgttgtgtatacagttaaaaaactcaagtcttgattttattgtttcccttttgtagtttgtatatacatagagctgaattggtgttctaattttggttgatttttatgtatacagtataaaatcgatcttagttttgttcattgatttgtatttgcacaaagttggaattttgcgtttgttattttgatgattgaaaccttttctgtatatacag

SEQ ID NO: 397 - DNA, 465 bp, Agrobacterium tumefacians
  source 1..465: mol_type = genomic DNA; note = MAS Mannopine Synthase Promoter Sequence
cgagatgaattatgcaaaataaatgctcgtgtaatgtgttggtgatttgtgggagtataatacacaacgaggctatttatccttttttggaaacgcgaaagacgtcacagtgagccgtcacacgcattttttttgctgtaatgcgttgtttcagttcacttttgactatcgaggcttggcgtgtcagatcatctattcaaaagtcattaatggctgcggatcaagaaaaagtaagatgggaggaaaatactggcaacatataggcccggttagtatgtcccacacgccgaaatcgacgacaaaaatggtaggaaaatatccagctaactcagatacttacgtcatgtcttacgtactaattggaaagtacttagtataaacaaggacggcaacaacaaaaaccaaaacaactatattcaccaatattatctagttctcaaaaaaatcatatcttcacacgtgaaa

SEQ ID NO: 398 - DNA, 353 bp, Cauliflower mosaic virus; identical to SEQ ID NO: 113
  source 1..353: mol_type = genomic DNA; note = CAM 35S Promoter Sequence

SEQ ID NO: 399 - DNA, 523 bp, Arabidopsis thaliana
  source 1..523: mol_type = genomic DNA; note = PAR (pseudoautosomal region) promoter sequence
tgaggcttgacatgattggtgcgtatgtttgtatgaagctacaggactgatttggcgggctatgagggcgggggaagctctggaagggccgcgatggggcgcgcggcgtccagaaggcgccatacggcccgctggcggcacccatccggtataaaagcccgcgaccccgaacggtgacctccactttcagcgacaaacgagcacttatacatacgcgactattctgccgctatacataaccactcagctagcttaagatcccatcaagcttgcatgccgggcgcgccagaaggagcgcagccaaaccaggatgatgtttgatggggtatttgagcacttgcaacccttatccggaagccccctggcccacaaaggctaggcgccaatgcaagcagttcgcatgcagcccctggagcggtgccctcctgataaaccggccagggggcctatgttctttacttttttacaagagaagtcactcaacatcttaaaacagtattcagtcgactggtaccaacaggct

SEQ ID NO: 400 - DNA, 500 bp, Chlorella vulgaris
  source 1..500: mol_type = genomic DNA; note = Cv PAS D (photosystem II protein D1) Promoter Sequence
ttttttattatcgcaaacaccagcggtaaattcagagaagagatggaaatttctaaaaaatctagaaaaaaaatctagaaacaagtaaaaacgtttcttatagcaaatacactaaatacttacgtgactttttcagtacaactacatacccaatcggtatcacagaaattctggaattgaaaaaattattgatttttcccaaagagtgcgctttaaattcttatagagaaaatagtgttgtattattagtaatttatgtgttgaaaatcttaagaattagagtattttttcttctttttttacttgttaaaaaaagtttttcaaattaatataaaaacctaattttaaatcgagtagcctttttgtttattttaatctttattttaatagttacttgactgagatttagattttagttacagtagggcctaacaaattaaatttttttaattttgggaaaaactcctttttaggaaaaaagaaaaaacattttaattttt

SEQ ID NO: 401 - DNA, 204 bp, Cytomegalovirus
  source 1..204: mol_type = genomic DNA; note = CMV Promoter
gtgatgcggttttggcagtacatcaatgggcgtggatagcggtttgactcacggggatttccaagtctccaccccattgacgtcaatgggagtttgttttggcaccaaaatcaacgggactttccaaaatgtcgtaacaactccgccccattgacgcaaatgggcggtaggcgtgtacggtgggaggtctatataagcagagct

SEQ ID NO: 402 - DNA, 508 bp, Cytomegalovirus
  source 1..508: mol_type = genomic DNA; note = CMV Promoter and Enhancer
  misc_feature 1..304: note = Enhancer
  misc_feature 305..508: note = Promoter
cgttacataacttacggtaaatggcccgcctggctgaccgcccaacgacccccgcccattgacgtcaataatgacgtatgttcccatagtaacgccaatagggactttccattgacgtcaatgggtggagtatttacggtaaactgcccacttggcagtacatcaagtgtatcatatgccaagtacgccccctattgacgtcaatgacggtaaatggcccgcctggcattatgcccagtacatgaccttatgggactttcctacttggcagtacatctacgtattagtcatcgctattaccatggtgatgcggttttggcagtacatcaatgggcgtggatagcggtttgactcacggggatttccaagtctccaccccattgacgtcaatgggagtttgttttggcaccaaaatcaacgggactttccaaaatgtcgtaacaactccgccccattgacgcaaatgggcggtaggcgtgtacggtgggaggtctatataagcagagct

SEQ ID NO: 403 - DNA, 317 bp, Simian virus 40
  source 1..317: mol_type = genomic DNA; note = SV40 Promoter
ggtgtggaaagtccccaggctccccagcaggcagaagtatgcaaagcatgcatctcaattagtcagcaaccaggtgtggaaagtccccaggctccccagcaggcagaagtatgcaaagcatgcatctcaattagtcagcaaccatagtcccgcccctaactccgcccatcccgcccctaactccgcccagttccgcccattctccgccccatggctgactaattttttttatttatgcagaggccgaggccgcctcggcctctgagctattccagaagtagtgaggaggcttttttggaggcctaggcttttgcaaa

SEQ ID NO: 404 - DNA, 20 bp, synthetic construct
  source 1..20: mol_type = other DNA; note = c-myc forward primer
tacaacacccgagcaaggac

SEQ ID NO: 405 - DNA, 20 bp, synthetic construct
  source 1..20: mol_type = other DNA; note = c-myc reverse primer
ttctcctcctcgtcgcagta

SEQ ID NO: 406 - DNA, 20 bp, synthetic construct
  source 1..20: mol_type = other DNA; note = k-ras forward primer
ggttgcgctgacctaggaat

SEQ ID NO: 407 - DNA, 20 bp, synthetic construct
  source 1..20: mol_type = other DNA; note = k-ras reverse primer
tccatttcggggcaaacagt
